United States Patent Application Publication US 2023/0416942 A1 - sequence listing, part 4

SEQ ID NO: 36796 - protein, 126 aa, Artificial Sequence
  Chemically Synthesized
QVQLQESGGGLVQAGGSLRLSCAASGTISPSYRMGWYRQAPGKERELVATISDGTITNYADSVKGRFTISRDNAKNTVYLQMNSLKPEDTAVYYCAVTSYLYWDRSRDRTLGFFYWGQGTQVTVSS

SEQ ID NO: 36797 - protein, 118 aa, Artificial Sequence
  Chemically Synthesized
QVQLQESGGGLVQAGGSLRLSCAASGSIFTQDVMGWYRQAPGKEREFVAAIDAGGITYYADSVKGRFTISRDNAKNTVYLQMNSLKPEDTAVYYCAVGVTYSYYHFYWGQGTQVTVSS

SEQ ID NO: 36798 - protein, 126 aa, Artificial Sequence
  Chemically Synthesized
QVQLQESGGGLVQAGGSLRLSCAASGTISYARTMGWYRQAPGKERELVAGIGTGATTNYADSVKGRFTISRDNAKNTVYLQMNSLKPEDTAVYYCAALERTGEDFTRDPSDRLDYWGQGTQVTVSS

SEQ ID NO: 36799 - protein, 117 aa, Artificial Sequence
  Chemically Synthesized
QVQLQESGGGLVQAGGSLRLSCAASGTISTSSMGWYRQAPGKERELVAGISGGTITNYADSVKGRFTISRDNAKNTVYLQMNSLKPEDTAVYYCAAWYLVYPYHAYWGQGTQVTVSS

SEQ ID NO: 36800 - protein, 118 aa, Artificial Sequence
  Chemically Synthesized
QVQLQESGGGLVQAGGSLRLSCAASGYISVLTRMGWYRQAPGKERELVATIGYGANTNYADSVKGRFTISRDNAKNTVYLQMNSLKPEDTAVYYCAVTQRYLRYHAYWGQGTQVTVSS

SEQ ID NO: 36801 - protein, 122 aa, Artificial Sequence
  Chemically Synthesized
QVQLQESGGGLVQAGGSLRLSCAASGTISLIAGMGWYRQAPGKERELVATISQGATTNYADSVKGRFTISRDNAKNTVYLQMNSLKPEDTAVYYCAAAGRRNTWQRFVHRYWGQGTQVTVSS

SEQ ID NO: 36802 - protein, 122 aa, Artificial Sequence
  Chemically Synthesized
QVQLQESGGGLVQAGGSLRLSCAASGYIFIVRYMGWYRQAPGKERELVAGISRGGSTYYADSVKGRFTISRDNAKNTVYLQMNSLKPEDTAVYYCAVVHYGDEKDAVEHAYWGQGTQVTVSS

SEQ ID NO: 36803 - protein, 118 aa, Artificial Sequence
  Chemically Synthesized
QVQLQESGGGLVQAGGSLRLSCAASGTISVPYYMGWYRQAPGKERELVATIAVGSITYYADSVKGRFTISRDNAKNTVYLQMNSLKPEDTAVYYCAVRDPIRYDYAYWGQGTQVTVSS

SEQ ID NO: 36804 - protein, 122 aa, Artificial Sequence
  Chemically Synthesized
QVQLQESGGGLVQAGGSLRLSCAASGTISVRYVMGWYRQAPGKERELVASIAYGTSTNYADSVKGRFTISRDNAKNTVYLQMNSLKPEDTAVYYCAVLAYRLPIRAADHTYWGQGTQVTVSS

SEQ ID NO: 36805 - protein, 118 aa, Artificial Sequence
  Chemically Synthesized
QVQLQESGGGLVQAGGSLRLSCAASGTIFYLVKMGWYRQAPGKEREFVAGISTGGNTYYADSVKGRFTISRDNAKNTVYLQMNSLKPEDTAVYYCAVRPYYSRNYRYWGQGTQVTVSS

SEQ ID NO: 36806 - protein, 118 aa, Artificial Sequence
  Chemically Synthesized
QVQLQESGGGLVQAGGSLRLSCAASGYISRRTYMGWYRQAPGKERELVAGIAPGGNTYYADSVKGRFTISRDNAKNTVYLQMNSLKPEDTAVYYCAVVLWVRYYHYYWGQGTQVTVSS

SEQ ID NO: 36807 - protein, 122 aa, Artificial Sequence
  Chemically Synthesized
QVQLQESGGGLVQAGGSLRLSCAASGTISLYGKMGWYRQAPGKEREFVAGIGRGGNTNYADSVKGRFTISRDNAKNTVYLQMNSLKPEDTAVYYCAVRRRRANYPRPYHDYWGQGTQVTVSS

SEQ ID NO: 36808 - protein, 122 aa, Artificial Sequence
  Chemically Synthesized
QVQLQESGGGLVQAGGSLRLSCAASGTISRRYTMGWYRQAPGKERELVAAISRGTITNYADSVKGRFTISRDNAKNTVYLQMNSLKPEDTAVYYCAARYRGIGYWSYAHYYWGQGTQVTVSS

SEQ ID NO: 36809 - protein, 118 aa, Artificial Sequence
  Chemically Synthesized
QVQLQESGGGLVQAGGSLRLSCAASGTISYYGRMGWYRQAPGKERELVAGIAIGTITYYADSVKGRFTISRDNAKNTVYLQMNSLKPEDTAVYYCAVYRWVIGTHRYWGQGTQVTVSS

SEQ ID NO: 36810 - protein, 122 aa, Artificial Sequence
  Chemically Synthesized
QVQLQESGGGLVQAGGSLRLSCAASGSISGDRYMGWYRQAPGKERELVAAIGPGTSTYYADSVKGRFTISRDNAKNTVYLQMNSLKPEDTAVYYCAVITVHVYWHKRYFVYWGQGTQVTVSS

SEQ ID NO: 36811 - protein, 118 aa, Artificial Sequence
  Chemically Synthesized
QVQLQESGGGLVQAGGSLRLSCAASGSIFRTPSMGWYRQAPGKERELVAAISYGGNTYYADSVKGRFTISRDNAKNTVYLQMNSLKPEDTAVYYCAVRRRSVRGYYYWGQGTQVTVSS

SEQ ID NO: 36812 - protein, 126 aa, Artificial Sequence
  Chemically Synthesized
QVQLQESGGGLVQAGGSLRLSCAASGNISQQYYMGWYRQAPGKEREFVAGIGDGGSTNYADSVKGRFTISRDNAKNTVYLQMNSLKPEDTAVYYCAALRFYYGGGYYSVVRRYRYWGQGTQVTVSS

SEQ ID NO: 36813 - protein, 118 aa, Artificial Sequence
  Chemically Synthesized
QVQLQESGGGLVQAGGSLRLSCAASGTIFYNKWMGWYRQAPGKERELVAGITYGTTTNYADSVKGRFTISRDNAKNTVYLQMNSLKPEDTAVYYCAVYSHRYLRHAYWGQGTQVTVSS

SEQ ID NO: 36814 - protein, 118 aa, Artificial Sequence
  Chemically Synthesized
QVQLQESGGGLVQAGGSLRLSCAASGNISRLDVMGWYRQAPGKEREFVAAISVGGNTNYADSVKGRFTISRDNAKNTVYLQMNSLKPEDTAVYYCAVYYDVRQHHDYWGQGTQVTVSS

SEQ ID NO: 36815 - protein, 118 aa, Artificial Sequence
  Chemically Synthesized
QVQLQESGGGLVQAGGSLRLSCAASGTISRQLSMGWYRQAPGKERELVAAIGRGTTTYYADSVKGRFTISRDNAKNTVYLQMNSLKPEDTAVYYCAVRYYIYRFHYYWGQGTQVTVSS

SEQ ID NO: 36816 - protein, 124 aa, Artificial Sequence
  Chemically Synthesized
QVQLQESGGGLVQAGGSLRLSCAASGYIFTAPRMGWYRQAPGKEREFVAGITYGTNTYYADSVKGRFTISRDNAKNTVYLQMNSLKPEDTAVYYCAANASNRPYSYYRYYFTYWGQGTQVTVSS

SEQ ID NO: 36817 - protein, 118 aa, Artificial Sequence
  Chemically Synthesized
QVQLQESGGGLVQAGGSLRLSCAASGNISSGNVMGWYRQAPGKERELVAAIGRGTNTYYADSVKGRFTISRDNAKNTVYLQMNSLKPEDTAVYYCAADWFLYGDHPYWGQGTQVTVSS

SEQ ID NO: 36818 - protein, 118 aa, Artificial Sequence
  Chemically Synthesized
QVQLQESGGGLVQAGGSLRLSCAASGSISQRRAMGWYRQAPGKERELVAGIGYGGTTYYADSVKGRFTISRDNAKNTVYLQMNSLKPEDTAVYYCAARLYYARYHYYWGQGTQVTVSS

SEQ ID NO: 36819 - protein, 118 aa, Artificial Sequence
  Chemically Synthesized
QVQLQESGGGLVQAGGSLRLSCAASGSIFSQRRMGWYRQAPGKERELVATISRGGTTNYADSVKGRFTISRDNAKNTVYLQMNSLKPEDTAVYYCAVWVVWSYYYVYWGQGTQVTVSS

SEQ ID NO: 36820 - protein, 125 aa, Artificial Sequence
  Chemically Synthesized
QVQLQESGGGLVQAGGSLRLSCAASGYISWFRQMGWYRQAPGKEREFVAAISQGSNTYYADSVKGRFTISRDNAKNTVYLQMNSLKPEDTAVYYCAVRSIVDALHKRYPNWFGYWGQGTQVTVSS

SEQ ID NO: 36821 - protein, 126 aa, Artificial Sequence
  Chemically Synthesized
QVQLQESGGGLVQAGGSLRLSCAASGSIFYYTGMGWYRQAPGKEREFVASIGYGTTTYYADSVKGRFTISRDNAKNTVYLQMNSLKPEDTAVYYCAVVHDEYSWYAYAYRTPHFYWGQGTQVTVSS

SEQ ID NO: 36822 - protein, 119 aa, Artificial Sequence
  Chemically Synthesized
QVQLQESGGGLVQAGGSLRLSCAASGNISIYSNMGWYRQAPGKERELVAGISKGTTTNYADSVKGRFTISRDNAKNTVYLQMNSLKPEDTAVYYCAAARTYWLSHLYYWGQGTQVTVSS

SEQ ID NO: 36823 - protein, 118 aa, Artificial Sequence
  Chemically Synthesized
QVQLQESGGGLVQAGGSLRLSCAASGSISFRRAMGWYRQAPGKERELVASIARGGTTNYADSVKGRFTISRDNAKNTVYLQMNSLKPEDTAVYYCAARDYNGYVHYYWGQGTQVTVSS

SEQ ID NO: 36824 - protein, 126 aa, Artificial Sequence
  Chemically Synthesized
QVQLQESGGGLVQAGGSLRLSCAASGTIFAPRYMGWYRQAPGKERELVAGITYGTSTYYADSVKGRFTISRDNAKNTVYLQMNSLKPEDTAVYYCAARPWYAIPSYVFRWYDFYYWGQGTQVTVSS

SEQ ID NO: 36825 - protein, 122 aa, Artificial Sequence
  Chemically Synthesized
QVQLQESGGGLVQAGGSLRLSCAASGYIFDVHSMGWYRQAPGKERELVATIAYGSTTNYADSVKGRFTISRDNAKNTVYLQMNSLKPEDTAVYYCAASVIDYPVYRSHFTYWGQGTQVTVSS

SEQ ID NO: 36826 - protein, 118 aa, Artificial Sequence
  Chemically Synthesized
QVQLQESGGGLVQAGGSLRLSCAASGSIFIQTFMGWYRQAPGKERELVAAIAYGGTTYYADSVKGRFTISRDNAKNTVYLQMNSLKPEDTAVYYCAVLRRGWITYRYWGQGTQVTVSS

SEQ ID NO: 36827 - protein, 118 aa, Artificial Sequence
  Chemically Synthesized
QVQLQESGGGLVQAGGSLRLSCAASGSIFWLYWMGWYRQAPGKERELVAGIARGATTNYADSVKGRFTISRDNAKNTVYLQMNSLKPEDTAVYYCAAVYSWRGYLAYWGQGTQVTVSS

SEQ ID NO: 36828 - protein, 118 aa, Artificial Sequence
  Chemically Synthesized
QVQLQESGGGLVQAGGSLRLSCAASGTIFILNAMGWYRQAPGKERELVAAIGYGGNTYYADSVKGRFTISRDNAKNTVYLQMNSLKPEDTAVYYCAANVNYFYHLVYWGQGTQVTVSS

SEQ ID NO: 36829 - protein, 122 aa, Artificial Sequence
  Chemically Synthesized
QVQLQESGGGLVQAGGSLRLSCAASGTISYRSTMGWYRQAPGKEREFVAGISLGTNTNYADSVKGRFTISRDNAKNTVYLQMNSLKPEDTAVYYCAVTKRRTWHYGQYYGYWGQGTQVTVSS

SEQ ID NO: 36830 - protein, 126 aa, Artificial Sequence
  Chemically Synthesized
QVQLQESGGGLVQAGGSLRLSCAASGTIFRVTSMGWYRQAPGKERELVAGINYGTNTYYADSVKGRFTISRDNAKNTVYLQMNSLKPEDTAVYYCAAGKPSRWGLPWNARYFFRYWGQGTQVTVSS

SEQ ID NO: 36831 - protein, 122 aa, Artificial Sequence
  Chemically Synthesized
QVQLQESGGGLVQAGGSLRLSCAASGYISLYWDMGWYRQAPGKEREFVATIAYGTITYYADSVKGRFTISRDNAKNTVYLQMNSLKPEDTAVYYCAVNAWYSVLGYVAHDYWGQGTQVTVSS

SEQ ID NO: 36832 - protein, 118 aa, Artificial Sequence
  Chemically Synthesized
QVQLQESGGGLVQAGGSLRLSCAASGSIFRYAKMGWYRQAPGKEREFVAGIAVGANTYYADSVKGRFTISRDNAKNTVYLQMNSLKPEDTAVYYCAAHRWYPRYLPYWGQGTQVTVSS

SEQ ID NO: 36833 - protein, 122 aa, Artificial Sequence
  Chemically Synthesized
QVQLQESGGGLVQAGGSLRLSCAASGNIFRVRTMGWYRQAPGKERELVAAINYGAITYYADSVKGRFTISRDNAKNTVYLQMNSLKPEDTAVYYCAALYSAYGSKYYTHQYWGQGTQVTVSS

SEQ ID NO: 36834 - protein, 118 aa, Artificial Sequence
  Chemically Synthesized
QVQLQESGGGLVQAGGSLRLSCAASGYISYVFNMGWYRQAPGKERELVAAINTGGSTNYADSVKGRFTISRDNAKNTVYLQMNSLKPEDTAVYYCAAHNRWYWPHQYWGQGTQVTVSS

SEQ ID NO: 36835 - protein, 122 aa, Artificial Sequence
  Chemically Synthesized
QVQLQESGGGLVQAGGSLRLSCAASGNISRQNYMGWYRQAPGKEREFVAGINRGGTTYYADSVKGRFTISRDNAKNTVYLQMNSLKPEDTAVYYCAAATRIYYVSRTYYTYWGQGTQVTVSS

SEQ ID NO: 36836 - protein, 116 aa, Artificial Sequence
  Chemically Synthesized
QVQLQESGGGLVQAGGSLRLSCAASGNISGRMGWYRQAPGKERELVASIDVGAITNYADSVKGRFTISRDNAKNTVYLQMNSLKPEDTAVYYCAAQRSYHWVYAYWGQGTQVTVSS

SEQ ID NO: 36837 - protein, 122 aa, Artificial Sequence
  Chemically Synthesized
QVQLQESGGGLVQAGGSLRLSCAASGSIFRRNAMGWYRQAPGKEREFVASIDRGASTNYADSVKGRFTISRDNAKNTVYLQMNSLKPEDTAVYYCAARVRRFSFQGPRHSYWGQGTQVTVSS

SEQ ID NO: 36838 - protein, 122 aa, Artificial Sequence
  Chemically Synthesized
QVQLQESGGGLVQAGGSLRLSCAASGYIFRVRIMGWYRQAPGKEREFVASIGRGTNTYYADSVKGRFTISRDNAKNTVYLQMNSLKPEDTAVYYCAAQTTRVYWSHYRHYYWGQGTQVTVSS

SEQ ID NO: 36839 - protein, 122 aa, Artificial Sequence
  Chemically Synthesized
QVQLQESGGGLVQAGGSLRLSCAASGSIFRPQNMGWYRQAPGKERELVASIAKGGNTNYADSVKGRFTISRDNAKNTVYLQMNSLKPEDTAVYYCAAYGHRVGTYYRYLRYWGQGTQVTVSS

SEQ ID NO: 36840 - protein, 120 aa, Artificial Sequence
  Chemically Synthesized
QVQLQESGGGLVQAGGSLRLSCAASGYISWVWRMGWYRQAPGKEREFVASINRGGNTNYADSVKGRFTISRDNAKNTVYLQMNSLKPEDTAVYYCAVYGNWRWYPRYRYWGQGTQVTVSS

SEQ ID NO: 36841 - protein, 122 aa, Artificial Sequence
  Chemically Synthesized
QVQLQESGGGLVQAGGSLRLSCAASGSISRYLYMGWYRQAPGKERELVAAISAGANTYYADSVKGRFTISRDNAKNTVYLQMNSLKPEDTAVYYCAVRHRTHLITRSGYDYWGQGTQVTVSS

SEQ ID NO: 36842 - protein, 122 aa, Artificial Sequence
  Chemically Synthesized
QVQLQESGGGLVQAGGSLRLSCAASGTIFSRGRMGWYRQAPGKERELVAGIAYGGSTYYADSVKGRFTISRDNAKNTVYLQMNSLKPEDTAVYYCAVGTYTRIRYQGPHAYWGQGTQVTVSS

SEQ ID NO: 36843 - protein, 126 aa, Artificial Sequence
  Chemically Synthesized
QVQLQESGGGLVQAGGSLRLSCAASGSIFRPRTMGWYRQAPGKEREFVAAIASGGNTYYADSVKGRFTISRDNAKNTVYLQMNSLKPEDTAVYYCAAVPQYGPWAYLSRFQAHLYWGQGTQVTVSS

SEQ ID NO: 36844 - protein, 118 aa, Artificial Sequence
  Chemically Synthesized
QVQLQESGGGLVQAGGSLRLSCAASGTIFYRWRMGWYRQAPGKEREFVATIGAGGNTYYADSVKGRFTISRDNAKNTVYLQMNSLKPEDTAVYYCAAKVYRYAYHAYWGQGTQVTVSS

SEQ ID NO: 36845 - protein, 122 aa, Artificial Sequence
  Chemically Synthesized
QVQLQESGGGLVQAGGSLRLSCAASGSIFIPRAMGWYRQAPGKEREFVAAISGGSSTYYADSVKGRFTISRDNAKNTVYLQMNSLKPEDTAVYYCAVIALYRYFGGGVLRYWGQGTQVTVSS

SEQ ID NO: 36846 - protein, 118 aa, Artificial Sequence
  Chemically Synthesized
QVQLQESGGGLVQAGGSLRLSCAASGSIFYGRQMGWYRQAPGKEREFVAAITGGSTTNYADSVKGRFTISRDNAKNTVYLQMNSLKPEDTAVYYCAASSFYYRRHGYWGQGTQVTVSS

SEQ ID NO: 36847 - protein, 126 aa, Artificial Sequence
  Chemically Synthesized
QVQLQESGGGLVQAGGSLRLSCAASGNIFAWGYMGWYRQAPGKERELVAAIGDGASTYYADSVKGRFTISRDNAKNTVYLQMNSLKPEDTAVYYCAANRYRQQQHYGQRRYPHRYWGQGTQVTVSS

SEQ ID NO: 36848 - protein, 122 aa, Artificial Sequence
  Chemically Synthesized
QVQLQESGGGLVQAGGSLRLSCAASGSISSTIYMGWYRQAPGKERELVATITYGANTYYADSVKGRFTISRDNAKNTVYLQMNSLKPEDTAVYYCAVRLGWYYLHWRSHQYWGQGTQVTVSS

SEQ ID NO: 36849 - protein, 118 aa, Artificial Sequence
  Chemically Synthesized
QVQLQESGGGLVQAGGSLRLSCAASGYISAWKRMGWYRQAPGKERELVASIASGGNTNYADSVKGRFTISRDNAKNTVYLQMNSLKPEDTAVYYCAASIYTWRYHAYWGQGTQVTVSS

SEQ ID NO: 36850 - protein, 115 aa, Artificial Sequence
  Chemically Synthesized
QVQLQESGGGLVQAGGSLRLSCAASGTISEDYDMGWYRQAPGKEREFVAGLMTVPYADSVKGRFTISRDNAKNTVYLQMNSLKPEDTAVYYCAVGVLYDLPFAYWGQGTQVTVSS

SEQ ID NO: 36851 - protein, 118 aa, Artificial Sequence
  Chemically Synthesized
QVQLQESGGGLVQAGGSLRLSCAASGTIFGYSAMGWYRQAPGKEREFVAAIGVGSTTNYADSVKGRFTISRDNAKNTVYLQMNSLKPEDTAVYYCAVAPSWYTVFYYWGQGTQVTVSS

SEQ ID NO: 36852 - protein, 121 aa, Artificial Sequence
  Chemically Synthesized
QVQLQESGGGLVQAGGSLRLSCAASGNIFSHYVMGWYRQAPGKERELVAGIGNGTSTNYADSVKGRFTISRDNAKNTVYLQMNSLKPEDTAVYYCAVDDDGYERATSVFYWGQGTQVTVSS

SEQ ID NO: 36853 - protein, 109 aa, Artificial Sequence
  Chemically Synthesized
QVQLQESGGGLVQAGGSLRLSCAASGTISGTTVMGWYRQAPGKEREFVASISASVVLPYADSVKGRFTISRDNAKNTVYLQMNSLKPEDTAVYYCAAYWGQGTQVTVSS

SEQ ID NO: 36854 - protein, 116 aa, Artificial Sequence
  Chemically Synthesized
QVQLQESGGGLVQAGGSLRLSCAASGSIQRAMGWYRQAPGKERELVAGIARGTNTYYADSVKGRFTISRDNAKNTVYLQMNSLKPEDTAVYYCAAYSRFSWTHGYWGQGTQVTVSS

SEQ ID NO: 36855 - protein, 125 aa, Artificial Sequence
  Chemically Synthesized
QVQLQESGGGLVQAGGSLRLSCAASGTISRYSTMGWYRQAPGKERELVAGIAFGTITYYADSVKGRFTISRDNAKNTVYLQMNSLKPEDTAVYYCAVEANKSTCTVNRRTTTFYWGQGTQVTVSS

SEQ ID NO: 36856 - protein, 118 aa, Artificial Sequence
  Chemically Synthesized
QVQLQESGGGLVQAGGSLRLSCAASGTIFRGWYMGWYRQAPGKERELVAAISPGAITNYADSVKGRFTISRDNAKNTVYLQMNSLKPEDTAVYYCAAVERWTVDFYYWGQGTQVTVSS

SEQ ID NO: 36857 - protein, 122 aa, Artificial Sequence
  Chemically Synthesized
QVQLQESGGGLVQAGGSLRLSCAASGTIFRRGDMGWYRQAPGKERELVAAISGGTTTYYADSVKGRFTISRDNAKNTVYLQMNSLKPEDTAVYYCAVDAWSYVTPYRSHSYWGQGTQVTVSS

SEQ ID NO: 36858 - protein, 122 aa, Artificial Sequence
  Chemically Synthesized
QVQLQESGGGLVQAGGSLRLSCAASGTISVYFDMGWYRQAPGKERELVASIGAGANTNYADSVKGRFTISRDNAKNTVYLQMNSLKPEDTAVYYCAVGVRGNSPPNRIHPYWGQGTQVTVSS

SEQ ID NO: 36859 - protein, 118 aa, Artificial Sequence
  Chemically Synthesized
QVQLQESGGGLVQAGGSLRLSCAASGTIFRAASMGWYRQAPGKERELVATIGYGASTNYADSVKGRFTISRDNAKNTVYLQMNSLKPEDTAVYYCAVTRYYWKRYAYWGQGTQVTVSS

SEQ ID NO: 36860 - protein, 118 aa, Artificial Sequence
  Chemically Synthesized
QVQLQESGGGLVQAGGSLRLSCAASGTISYNSYMGWYRQAPGKEREFVAGITAGGITYYADSVKGRFTISRDNAKNTVYLQMNSLKPEDTAVYYCAVYYGYDELLRYWGQGTQVTVSS

SEQ ID NO: 36861 - protein, 118 aa, Artificial Sequence
  Chemically Synthesized
QVQLQESGGGLVQAGGSLRLSCAASGTIFPLRRMGWYRQAPGKEREFVAAINRGTITNYADSVKGRFTISRDNAKNTVYLQMNSLKPEDTAVYYCAAITSYFGYHPYWGQGTQVTVSS

SEQ ID NO: 36862 - protein, 118 aa, Artificial Sequence
  Chemically Synthesized
QVQLQESGGGLVQAGGSLRLSCAASGSISRYQRMGWYRQAPGKEREFVASIDRGGTTNYADSVKGRFTISRDNAKNTVYLQMNSLKPEDTAVYYCAALRGYIYVHGYWGQGTQVTVSS

SEQ ID NO: 36863 - protein, 122 aa, Artificial Sequence
  Chemically Synthesized
QVQLQESGGGLVQAGGSLRLSCAASGNISRRAYMGWYRQAPGKERELVAAIDYGGSTNYADSVKGRFTISRDNAKNTVYLQMNSLKPEDTAVYYCAAYHYSIAYLFSYFGYWGQGTQVTVSS

SEQ ID NO: 36864 - protein, 117 aa, Artificial Sequence
  Chemically Synthesized
QVQLQESGGGLVQAGGSLRLSCAASGNISPLRYMGWYRQAPGKEREFVAAIAAGGITYYADSVKGRFTISRDNAKNTVYLQMNSLKPEDTAVYYCAATYKVGFHGYWGQGTQVTVSS

SEQ ID NO: 36865 - protein, 118 aa, Artificial Sequence
  Chemically Synthesized
QVQLQESGGGLVQAGGSLRLSCAASGTISYSDYMGWYRQAPGKEREFVATISYGSNTYYADSVKGRFTISRDNAKNTVYLQMNSLKPEDTAVYYCAADFLIYRAHDYWGQGTQVTVSS

SEQ ID NO: 36866 - protein, 122 aa, Artificial Sequence
  Chemically Synthesized
QVQLQESGGGLVQAGGSLRLSCAASGNIFRGNIMGWYRQAPGKEREFVAAITRGGTTYYADSVKGRFTISRDNAKNTVYLQMNSLKPEDTAVYYCAVRSYFSYTRNDAFRYWGQGTQVTVSS

SEQ ID NO: 36867 - protein, 120 aa, Artificial Sequence
  Chemically Synthesized
QVQLQESGGGLVQAGGSLRLSCAASGNIFTAGGMGWYRQAPGKEREFVASIDAGSITYYADSVKGRFTISRDNAKNTVYLQMNSLKPEDTAVYYCAVPHYITSRYVYAYWGQGTQVTVSS

SEQ ID NO: 36868 - protein, 118 aa, Artificial Sequence
  Chemically Synthesized
QVQLQESGGGLVQAGGSLRLSCAASGSIFRRASMGWYRQAPGKERELVAAIGTGATTYYADSVKGRFTISRDNAKNTVYLQMNSLKPEDTAVYYCAVGTDHYVDHYYWGQGTQVTVSS

SEQ ID NO: 36869 - protein, 126 aa, Artificial Sequence
  Chemically Synthesized
QVQLQESGGGLVQAGGSLRLSCAASGTIFPSDTMGWYRQAPGKEREFVAGIAYGTTTYYADSVKGRFTISRDNAKNTVYLQMNSLKPEDTAVYYCAANNRTRYRWRYYRPYFYDYWGQGTQVTVSS

SEQ ID NO: 36870 - protein, 119 aa, Artificial Sequence
  Chemically Synthesized
QVQLQESGGGLVQAGGSLRLSCAASGNIFGPDTMGWYRQAPGKERELVASIADGGSTNYADSVKGRFTISRDNAKNTVYLQMNSLKPEDTAVYYCAVNAPYWDVRHHYWGQGTQVTVSS

SEQ ID NO: 36871 - protein, 122 aa, Artificial Sequence
  Chemically Synthesized
QVQLQESGGGLVQAGGSLRLSCAASGYIFRPYGMGWYRQAPGKERELVATITPGAITNYADSVKGRFTISRDNAKNTVYLQMNSLKPEDTAVYYCAVLKYRRGYWRYYLDYWGQGTQVTVSS

SEQ ID NO: 36872 - protein, 118 aa, Artificial Sequence
  Chemically Synthesized
QVQLQESGGGLVQAGGSLRLSCAASGSIFQYHEMGWYRQAPGKEREFVAGITFGTTTNYADSVKGRFTISRDNAKNTVYLQMNSLKPEDTAVYYCAADYNRDFFHDYWGQGTQVTVSS

SEQ ID NO: 36873 - protein, 117 aa, Artificial Sequence
  Chemically Synthesized
QVQLQESGGGLVQAGGSLRLSCAASGYIFASKDMGWYRQAPGKERELVASISYGTSTNYADSVKGRFTISRDNAKNTVYLQMNSLKPEDTAVYYCAVLVRIAFLDYWGQGTQVTVSS

SEQ ID NO: 36874 - protein, 114 aa, Artificial Sequence
  Chemically Synthesized
QVQLQESGGGLVQAGGSLRLSCAASGYISIDYSMGWYRQAPGKEREFVLPYADSVKGRFTISRDNAKNTVYLQMNSLKPEDTAVYYCAAGLGWDYGGDSSLSYWGQGTQVTVSS

SEQ ID NO: 36875 - protein, 117 aa, Artificial Sequence
  Chemically Synthesized
QVQLQESGGGLVQAGGSLRLSCAASGTISYDSMGWYRQAPGKEREFVAAVLVPYADSVKGRFTISRDNAKNTVYLQMNSLKPEDTAVYYCAAGNVIWDILDVGLDYWGQGTQVTVSS

SEQ ID NO: 36876 - protein, 118 aa, Artificial Sequence
  Chemically Synthesized
QVQLQESGGGLVQAGGSLRLSCAASGNIFGYRPMGWYRQAPGKEREFVAAINWGSSTYYADSVKGRFTISRDNAKNTVYLQMNSLKPEDTAVYYCAVRSHWTPDHYYWGQGTQVTVSS

SEQ ID NO: 36877 - protein, 118 aa, Artificial Sequence
  Chemically Synthesized
QVQLQESGGGLVQAGGSLRLSCAASGSISVAYFMGWYRQAPGKEREFVAGITRGANTYYADSVKGRFTISRDNAKNTVYLQMNSLKPEDTAVYYCAVGLPQRARHSYWGQGTQVTVSS

SEQ ID NO: 36878 - protein, 118 aa, Artificial Sequence
  Chemically Synthesized
QVQLQESGGGLVQAGGSLRLSCAASGTIFRQYSMGWYRQAPGKERELVASIGIGANTNYADSVKGRFTISRDNAKNTVYLQMNSLKPEDTAVYYCAVAYWPRYAHGYWGQGTQVTVSS

SEQ ID NO: 36879 - protein, 118 aa, Artificial Sequence
  Chemically Synthesized
QVQLQESGGGLVQAGGSLRLSCAASGNISDLDPMGWYRQAPGKEREFVAGISNGTTTYYADSVKGRFTISRDNAKNTVYLQMNSLKPEDTAVYYCAAYGQYAQYFDYWGQGTQVTVSS

SEQ ID NO: 36880 - protein, 118 aa, Artificial Sequence
  Chemically Synthesized
QVQLQESGGGLVQAGGSLRLSCAASGYIFSAEYMGWYRQAPGKERELVAAINIGSSTYYADSVKGRFTISRDNAKNTVYLQMNSLKPEDTAVYYCAAGYYWYYDLYYWGQGTQVTVSS

SEQ ID NO: 36881 - protein, 122 aa, Artificial Sequence
  Chemically Synthesized
QVQLQESGGGLVQAGGSLRLSCAASGNIFAYWYMGWYRQAPGKERELVATITAGGSTYYADSVKGRFTISRDNAKNTVYLQMNSLKPEDTAVYYCAVRRGTTIYYSRRHHYWGQGTQVTVSS

SEQ ID NO: 36882 - protein, 122 aa, Artificial Sequence
  Chemically Synthesized
QVQLQESGGGLVQAGGSLRLSCAASGTISGYSYMGWYRQAPGKEREFVATITYGAITNYADSVKGRFTISRDNAKNTVYLQMNSLKPEDTAVYYCAARTSYNYWRYRWHRYWGQGTQVTVSS

SEQ ID NO: 36883 - protein, 126 aa, Artificial Sequence
  Chemically Synthesized
QVQLQESGGGLVQAGGSLRLSCAASGSIFYYVDMGWYRQAPGKEREFVATIDYGGTTYYADSVKGRFTISRDNAKNTVYLQMNSLKPEDTAVYYCAAYSQVYRYSYWKGSGQFNYWGQGTQVTVSS

SEQ ID NO: 36884 - protein, 115 aa, Artificial Sequence
  Chemically Synthesized
QVQLQESGGGLVQAGGSLRLSCAASGNIFRRLNMGWYRQAPGKERELVAAITKGSNTYYADSVKGRFTISRDNAKNTVYLQMNSLKPEDTAVYYCAVKRTYYFYWGQGTQVTVSS

SEQ ID NO: 36885 - protein, 118 aa, Artificial Sequence
  Chemically Synthesized
QVQLQESGGGLVQAGGSLRLSCAASGTIFRATFMGWYRQAPGKEREFVAAIGGGSNTNYADSVKGRFTISRDNAKNTVYLQMNSLKPEDTAVYYCAVKRYYLYRYFYWGQGTQVTVSS

SEQ ID NO: 36886 - protein, 120 aa, Artificial Sequence
  Chemically Synthesized
QVQLQESGGGLVQAGGSLRLSCAASGTIFLTLAMGWYRQAPGKERELVAAIGLGTNYADSVKGRFTISRDNAKNTVYLQMNSLKPEDTAVYYCAVWAGGLPAKSLVLGYWGQGTQVTVSS

SEQ ID NO: 36887 - protein, 122 aa, Artificial Sequence
  Chemically Synthesized
QVQLQESGGGLVQAGGSLRLSCAASGNISLYGTMGWYRQAPGKERELVAGISPGAITYYADSVKGRFTISRDNAKNTVYLQMNSLKPEDTAVYYCAVGVTFREYAVVRHIYWGQGTQVTVSS

SEQ ID NO: 36888 - protein, 122 aa, Artificial Sequence
  Chemically Synthesized
QVQLQESGGGLVQAGGSLRLSCAASGNISRSEGMGWYRQAPGKEREFVAGINSGGTTYYADSVKGRFTISRDNAKNTVYLQMNSLKPEDTAVYYCAVDGGQYYYVRHYFLYWGQGTQVTVSS

SEQ ID NO: 36889 - protein, 118 aa, Artificial Sequence
  Chemically Synthesized
QVQLQESGGGLVQAGGSLRLSCAASGNIFLEIDMGWYRQAPGKERELVATIDAGATTNYADSVKGRFTISRDNAKNTVYLQMNSLKPEDTAVYYCAVTAYYIGDLVYWGQGTQVTVSS

SEQ ID NO: 36890 - protein, 122 aa, Artificial Sequence
  Chemically Synthesized
QVQLQESGGGLVQAGGSLRLSCAASGYISASGNMGWYRQAPGKERELVAAITYGSNTNYADSVKGRFTISRDNAKNTVYLQMNSLKPEDTAVYYCAVAYPRWFLHHKLHGYWGQGTQVTVSS

SEQ ID NO: 36891 - protein, 118 aa, Artificial Sequence
  Chemically Synthesized
QVQLQESGGGLVQAGGSLRLSCAASGNIFTKRSMGWYRQAPGKERELVASINRGGTTYYADSVKGRFTISRDNAKNTVYLQMNSLKPEDTAVYYCAVWHGRWANFLYWGQGTQVTVSS

SEQ ID NO: 36892 - protein, 125 aa, Artificial Sequence
  Chemically Synthesized
QVQLQESGGGLVQAGGSLRLSCAASGSIFVRYDMGWYRQAPGKERELVATINTGTSTNYADSVKGRFTISRDNAKNTVYLQMNSLKPEDTAVYYCAVPYYTRVIDDSFRTTSFYWGQGTQVTVSS

SEQ ID NO: 36893 - protein, 119 aa, Artificial Sequence
  Chemically Synthesized
QVQLQESGGGLVQAGGSLRLSCAASGNISYPTVMGWYRQAPGKEREFVAGITRGGITNYADSVKGRFTISRDNAKNTVYLQMNSLKPEDTAVYYCAVGYYFSGGLHGYWGQGTQVTVSS

SEQ ID NO: 36894 - protein, 118 aa, Artificial Sequence
  Chemically Synthesized
QVQLQESGGGLVQAGGSLRLSCAASGYIFYRPYMGWYRQAPGKERELVATIGTGSSTNYADSVKGRFTISRDNAKNTVYLQMNSLKPEDTAVYYCAADFETNRYHAYWGQGTQVTVSS

SEQ ID NO: 36895 - protein, 118 aa, Artificial Sequence
  Chemically Synthesized
QVQLQESGGGLVQAGGSLRLSCAASGTISIYVYMGWYRQAPGKEREFVAAITAGATTYYADSVKGRFTISRDNAKNTVYLQMNSLKPEDTAVYYCAADLDYNRHFEYWGQGTQVTVSS

SEQ ID NO: 36896 - protein, 126 aa, Artificial Sequence
  Chemically Synthesized
QVQLQESGGGLVQAGGSLRLSCAASGNIFYYLKMGWYRQAPGKEREFVAAITVGTNTNYADSVKGRFTISRDNAKNTVYLQMNSLKPEDTAVYYCAARKQIYDFILSYVSDYHRYWGQGTQVTVSS

SEQ ID NO: 36897 - protein, 118 aa, Artificial Sequence
  Chemically Synthesized
QVQLQESGGGLVQAGGSLRLSCAASGNISQRWYMGWYRQAPGKERELVAAIGYGANTNYADSVKGRFTISRDNAKNTVYLQMNSLKPEDTAVYYCAAIGRYVRLYRYWGQGTQVTVSS

SEQ ID NO: 36898 - protein, 122 aa, Artificial Sequence
  Chemically Synthesized
QVQLQESGGGLVQAGGSLRLSCAASGTISDVAFMGWYRQAPGKEREFVAGIAAGGSTNYADSVKGRFTISRDNAKNTVYLQMNSLKPEDTAVYYCAVPHPVEGSYYPVPWYWGQGTQVTVSS

SEQ ID NO: 36899 - protein, 122 aa, Artificial Sequence
  Chemically Synthesized
QVQLQESGGGLVQAGGSLRLSCAASGTIFSDYYMGWYRQAPGKEREFVATINAGGITYYADSVKGRFTISRDNAKNTVYLQMNSLKPEDTAVYYCAVISSNDEYTNVYHLYWGQGTQVTVSS

SEQ ID NO: 36900 - protein, 122 aa, Artificial Sequence
  Chemically Synthesized
QVQLQESGGGLVQAGGSLRLSCAASGYISWSVNMGWYRQAPGKERELVAGIDGGGTTNYADSVKGRFTISRDNAKNTVYLQMNSLKPEDTAVYYCAAGGYYVFRRTYWVYYWGQGTQVTVSS

SEQ ID NO: 36901 - protein, 122 aa, Artificial Sequence
  Chemically Synthesized
QVQLQESGGGLVQAGGSLRLSCAASGNISTRRYMGWYRQAPGKEREFVASITRGAITNYADSVKGRFTISRDNAKNTVYLQMNSLKPEDTAVYYCAVTRYGVYVDPRFHRYWGQGTQVTVSS

SEQ ID NO: 36902 - protein, 118 aa, Artificial Sequence
  Chemically Synthesized
QVQLQESGGGLVQAGGSLRLSCAASGTIFPARYMGWYRQAPGKEREFVATIAPGASTYYADSVKGRFTISRDNAKNTVYLQMNSLKPEDTAVYYCAVRFVYYARHSYWGQGTQVTVSS

SEQ ID NO: 36903 - protein, 122 aa, Artificial Sequence
  Chemically Synthesized
QVQLQESGGGLVQAGGSLRLSCAASGNISSIYGMGWYRQAPGKEREFVAGITQGTSTYYADSVKGRFTISRDNAKNTVYLQMNSLKPEDTAVYYCAAVKITTYRYGSALRYWGQGTQVTVSS

SEQ ID NO: 36904 - protein, 122 aa, Artificial Sequence
  Chemically Synthesized
QVQLQESGGGLVQAGGSLRLSCAASGTISRQLNMGWYRQAPGKERELVAGITRGGTTNYADSVKGRFTISRDNAKNTVYLQMNSLKPEDTAVYYCAAYWYTRTFGGGPHPYWGQGTQVTVSS

SEQ ID NO: 36905 - protein, 118 aa, Artificial Sequence
  Chemically Synthesized
QVQLQESGGGLVQAGGSLRLSCAASGYIFTRANMGWYRQAPGKERELVAGIAAGAITYYADSVKGRFTISRDNAKNTVYLQMNSLKPEDTAVYYCAVYPYYRRGYWYWGQGTQVTVSS

SEQ ID NO: 36906 - protein, 118 aa, Artificial Sequence
  Chemically Synthesized
QVQLQESGGGLVQAGGSLRLSCAASGNIFGFYYMGWYRQAPGKEREFVAGISYGGITYYADSVKGRFTISRDNAKNTVYLQMNSLKPEDTAVYYCAVAKPYWRYHAYWGQGTQVTVSS

SEQ ID NO: 36907 - protein, 118 aa, Artificial Sequence
  Chemically Synthesized
QVQLQESGGGLVQAGGSLRLSCAASGSIFRRTAMGWYRQAPGKEREFVAGITNGAITYYADSVKGRFTISRDNAKNTVYLQMNSLKPEDTAVYYCAVPYRLLIGHAYWGQGTQVTVSS

SEQ ID NO: 36908 - protein, 118 aa, Artificial Sequence
  Chemically Synthesized
QVQLQESGGGLVQAGGSLRLSCAASGTISKLYIMGWYRQAPGKERELVAAISYGSTTNYADSVKGRFTISRDNAKNTVYLQMNSLKPEDTAVYYCAARGWGWWAFTYWGQGTQVTVSS

SEQ ID NO: 36909 - protein, 122 aa, Artificial Sequence
  Chemically Synthesized
QVQLQESGGGLVQAGGSLRLSCAASGNISSQAYMGWYRQAPGKEREFVAGINRGTSTYYADSVKGRFTISRDNAKNTVYLQMNSLKPEDTAVYYCAVIEGAYRNKYVYFPYWGQGTQVTVSS

SEQ ID NO: 36910 - protein, 118 aa, Artificial Sequence
  Chemically Synthesized
QVQLQESGGGLVQAGGSLRLSCAASGNIFLWRYMGWYRQAPGKERELVAAINRGTSTNYADSVKGRFTISRDNAKNTVYLQMNSLKPEDTAVYYCAAQSGRYYPLGYWGQGTQVTVSS

SEQ ID NO: 36911 - protein, 126 aa, Artificial Sequence
  Chemically Synthesized
QVQLQESGGGLVQAGGSLRLSCAASGSISTVDRMGWYRQAPGKEREFVACINKGTNTNYADSVKGRFTISRDNAKNTVYLQMNSLKPEDTAVYYCAAGYAVRGSHWEGAAGFHTYWGQGTQVTVSS

SEQ ID NO: 36912 - protein, 126 aa, Artificial Sequence
  Chemically Synthesized
QVQLQESGGGLVQAGGSLRLSCAASGYISPRHFMGWYRQAPGKERELVASISYGTTTNYADSVKGRFTISRDNAKNTVYLQMNSLKPEDTAVYYCAAGPIRRAVYYRDGYPWFRYWGQGTQVTVSS

SEQ ID NO: 36913 - protein, 126 aa, Artificial Sequence
  Chemically Synthesized
QVQLQESGGGLVQAGGSLRLSCAASGTIFYRLYMGWYRQAPGKERELVASITYGSSTYYADSVKGRFTISRDNAKNTVYLQMNSLKPEDTAVYYCAVWPHYTVVYNVYVLPPYYYWGQGTQVTVSS

SEQ ID NO: 36914 - protein, 122 aa, Artificial Sequence
  Chemically Synthesized
QVQLQESGGGLVQAGGSLRLSCAASGNISTYGRMGWYRQAPGKERELVAGIGRGGSTYYADSVKGRFTISRDNAKNTVYLQMNSLKPEDTAVYYCAVVYYRSYSYGRYFPYWGQGTQVTVSS

SEQ ID NO: 36915 - protein, 118 aa, Artificial Sequence
  Chemically Synthesized
QVQLQESGGGLVQAGGSLRLSCAASGSISVYRKMGWYRQAPGKERELVASINRGTSTYYADSVKGRFTISRDNAKNTVYLQMNSLKPEDTAVYYCAVVRWYGYGHSYWGQGTQVTVSS

SEQ ID NO: 36916 - protein, 116 aa, Artificial Sequence
  Chemically Synthesized
QVQLQESGGGLVQAGGSLRLSCAASGSISADNYMGWYRQAPGKERELVAAIAYGGITYYADSVKGRFTISRDNAKNTVYLQMNSLKPEDTAVYYCAAYYGEFHGYWGQGTQVTVSS

SEQ ID NO: 36917 - protein, 118 aa, Artificial Sequence
  Chemically Synthesized
QVQLQESGGGLVQAGGSLRLSCAASGSISYARAMGWYRQAPGKEREFVAAITYGASTYYADSVKGRFTISRDNAKNTVYLQMNSLKPEDTAVYYCAAARSRRATFLYWGQGTQVTVSS

SEQ ID NO: 36918 - protein, 122 aa, Artificial Sequence
  Chemically Synthesized
QVQLQESGGGLVQAGGSLRLSCAASGSIFGRRYMGWYRQAPGKERELVAGIARGASTYYADSVKGRFTISRDNAKNTVYLQMNSLKPEDTAVYYCAVRFRSTDTRYYAHDYWGQGTQVTVSS

SEQ ID NO: 36919 - protein, 118 aa, Artificial Sequence
  Chemically Synthesized
QVQLQESGGGLVQAGGSLRLSCAASGNIFWTRAMGWYRQAPGKEREFVASISHGASTNYADSVKGRFTISRDNAKNTVYLQMNSLKPEDTAVYYCAASAWYSGAYRYWGQGTQVTVSS

SEQ ID NO: 36920 - protein, 122 aa, Artificial Sequence
  Chemically Synthesized
QVQLQESGGGLVQAGGSLRLSCAASGYISNVLYMGWYRQAPGKERELVASIANGATTYYADSVKGRFTISRDNAKNTVYLQMNSLKPEDTAVYYCAASDDAIAARQYEHVYWGQGTQVTVSS

SEQ ID NO: 36921 - protein, 126 aa, Artificial Sequence
  Chemically Synthesized
QVQLQESGGGLVQAGGSLRLSCAASGTISGRARMGWYRQAPGKERELVASIAQGSTTNYADSVKGRFTISRDNAKNTVYLQMNSLKPEDTAVYYCAAHDGQIAYRSLDYWPALRYWGQGTQVTVSS

SEQ ID NO: 36922 - protein, 122 aa, Artificial Sequence
  Chemically Synthesized
QVQLQESGGGLVQAGGSLRLSCAASGSISARYYMGWYRQAPGKERELVAAIDIGANTNYADSVKGRFTISRDNAKNTVYLQMNSLKPEDTAVYYCAASARYRYWRPITFRYWGQGTQVTVSS

SEQ ID NO: 36923 - protein, 122 aa, Artificial Sequence
  Chemically Synthesized
QVQLQESGGGLVQAGGSLRLSCAASGSISSTTRMGWYRQAPGKERELVAGINQGANTNYADSVKGRFTISRDNAKNTVYLQMNSLKPEDTAVYYCAAYRYYTRPQTRTHRYWGQGTQVTVSS

SEQ ID NO: 36924 - protein, 122 aa, Artificial Sequence
  Chemically Synthesized
QVQLQESGGGLVQAGGSLRLSCAASGYIFYSRHMGWYRQAPGKEREFVAAIGGGAITNYADSVKGRFTISRDNAKNTVYLQMNSLKPEDTAVYYCAAVPSPYYASFGLLVYWGQGTQVTVSS

SEQ ID NO: 36925 - protein, 119 aa, Artificial Sequence
  Chemically Synthesized
QVQLQESGGGLVQAGGSLRLSCAASGNISDAKIMGWYRQAPGKERELVATIDYGSITNYADSVKGRFTISRDNAKNTVYLQMNSLKPEDTAVYYCAALGVIDYYGYDYWGQGTQVTVSS

SEQ ID NO: 36926 - protein, 118 aa, Artificial Sequence
  Chemically Synthesized
QVQLQESGGGLVQAGGSLRLSCAASGNIFGYYAMGWYRQAPGKEREFVATINQGGSTYYADSVKGRFTISRDNAKNTVYLQMNSLKPEDTAVYYCAAAFWAYSVYRYWGQGTQVTVSS

SEQ ID NO: 36927 - protein, 117 aa, Artificial Sequence
  Chemically Synthesized
QVQLQESGGGLVQAGGSLRLSCAASGNIFNFRYMGWYRQAPGKERELVAGIAGGASTYYADSVKGRFTISRDNAKNTVYLQMNSLKPEDTAVYYCAVVRSARAHYYWGQGTQVTVSS

SEQ ID NO: 36928 - protein, 122 aa, Artificial Sequence
  Chemically Synthesized
QVQLQESGGGLVQAGGSLRLSCAASGYISRTGSMGWYRQAPGKEREFVASISQGGNTNYADSVKGRFTISRDNAKNTVYLQMNSLKPEDTAVYYCAVWYRSYYGQHRAFRYWGQGTQVTVSS

SEQ ID NO: 36929 - protein, 117 aa, Artificial Sequence
  Chemically Synthesized
QVQLQESGGGLVQAGGSLRLSCAASGYISSYGMGWYRQAPGKERELVAGIALGTSTYYADSVKGRFTISRDNAKNTVYLQMNSLKPEDTAVYYCAVYVYFYDTFTYWGQGTQVTVSS

SEQ ID NO: 36930 - protein, 119 aa, Artificial Sequence
  Chemically Synthesized
QVQLQESGGGLVQAGGSLRLSCAASGTISYTFGMGWYRQAPGKERELVAGITPIGGNTYYADSVKGRFTISRDNAKNTVYLQMNSLKPEDTAVYYCAVLAYTGDAYDYWGQGTQVTVSS

SEQ ID NO: 36931 - protein, 117 aa, Artificial Sequence
  Chemically Synthesized
QVQLQESGGGLVQAGGSLRLSCAASGSISIARYMGWYRQAPGKEREFVAAINSVVLPYADSVKGRFTISRDNAKNTVYLQMNSLKPEDTAVYYCAALPWYYDYHGYWGQGTQVTVSS

SEQ ID NO: 36932 - protein, 126 aa, Artificial Sequence
  Chemically Synthesized
QVQLQESGGGLVQAGGSLRLSCAASGSIFRPRIMGWYRQAPGKEREFVAGIGVGTSTYYADSVKGRFTISRDNAKNTVYLQMNSLKPEDTAVYYCAAQRGGYNQHVYREHASLAYWGQGTQVTVSS

SEQ ID NO: 36933 - protein, 122 aa, Artificial Sequence
  Chemically Synthesized
QVQLQESGGGLVQAGGSLRLSCAASGYISPDDIMGWYRQAPGKERELVAAITNGTITYYADSVKGRFTISRDNAKNTVYLQMNSLKPEDTAVYYCAAGPTLVRAKDSDLAYWGQGTQVTVSS

SEQ ID NO: 36934 - protein, 118 aa, Artificial Sequence
  Chemically Synthesized
QVQLQESGGGLVQAGGSLRLSCAASGYIFAPYGMGWYRQAPGKEREFVAAIGAGATTYYADSVKGRFTISRDNAKNTVYLQMNSLKPEDTAVYYCAVLAYFTYYFGYWGQGTQVTVSS

SEQ ID NO: 36935 - protein, 123 aa, Artificial Sequence
  Chemically Synthesized
QVQLQESGGGLVQAGGSLRLSCAASGSISGRVGMGWYRQAPGKERELVATISRGSNTNYADSVKGRFTISRDNAKNTVYLQMNSLKPEDTAVYYCAVHFWRYVYLPYDRHRYWGQGTQVTVSS

SEQ ID NO: 36936 - protein, 122 aa, Artificial Sequence
  Chemically Synthesized
QVQLQESGGGLVQAGGSLRLSCAASGNIFWYRSMGWYRQAPGKEREFVAAINYGSNTNYADSVKGRFTISRDNAKNTVYLQMNSLKPEDTAVYYCAARHISIVPNRFSHSYWGQGTQVTVSS

SEQ ID NO: 36937 - protein, 118 aa, Artificial Sequence
  Chemically Synthesized
QVQLQESGGGLVQAGGSLRLSCAASGNISSDPGMGWYRQAPGKERELVAGIDIGSNTYYADSVKGRFTISRDNAKNTVYLQMNSLKPEDTAVYYCAAPGYDYPYHYYWGQGTQVTVSS

SEQ ID NO: 36938 - protein, 125 aa, Artificial Sequence
  Chemically Synthesized
QVQLQESGGGLVQAGGSLRLSCAASGNISYFGMGWYRQAPGKERELVATITIGASTYYADSVKGRFTISRDNAKNTVYLQMNSLKPEDTAVYYCAAGDSLSVIPETTPYYYLNYWGQGTQVTVSS

SEQ ID NO: 36939 - protein, 121 aa, Artificial Sequence
  Chemically Synthesized
QVQLQESGGGLVQAGGSLRLSCAASGSIFRTYYMGWYRQAPGKEREFVASIGYGTSTNYADSVKGRFTISRDNAKNTVYLQMNSLKPEDTAVYYCAVTWLTLLGYWHHNYWGQGTQVTVSS

SEQ ID NO: 36940 - protein, 118 aa, Artificial Sequence
  Chemically Synthesized
QVQLQESGGGLVQAGGSLRLSCAASGNISSYIIMGWYRQAPGKEREFVAGIDEGSSTNYADSVKGRFTISRDNAKNTVYLQMNSLKPEDTAVYYCAVHDWPTSTYDYWGQGTQVTVSS

SEQ ID NO: 36941 - protein, 118 aa, Artificial Sequence
  Chemically Synthesized
QVQLQESGGGLVQAGGSLRLSCAASGTIFGYWAMGWYRQAPGKERELVASIDYGSTTYYADSVKGRFTISRDNAKNTVYLQMNSLKPEDTAVYYCAALDLNRYWFVYWGQGTQVTVSS

SEQ ID NO: 36942 - protein, 120 aa, Artificial Sequence
  Chemically Synthesized
QVQLQESGGGLVQAGGSLRLSCAASGYISWDMGWYRQAPGKEREFVATIGVGASTYYADSVKGRFTISRDNAKNTVYLQMNSLKPEDTAVYYCAAKDDSYDYSYEELNYWGQGTQVTVSS

SEQ ID NO: 36943 - protein, 122 aa, Artificial Sequence
  Chemically Synthesized
QVQLQESGGGLVQAGGSLRLSCAASGSIFYPTRMGWYRQAPGKEREFVATITYGTITYYADSVKGRFTISRDNAKNTVYLQMNSLKPEDTAVYYCAVYFRYSNAYYRRHRYWGQGTQVTVSS

SEQ ID NO: 36944 - protein, 126 aa, Artificial Sequence
  Chemically Synthesized
QVQLQESGGGLVQAGGSLRLSCAASGTIFSRFYMGWYRQAPGKEREFVASINPGSTTYYADSVKGRFTISRDNAKNTVYLQMNSLKPEDTAVYYCAARRVYRHTWPYTHYRWYKYWGQGTQVTVSS

SEQ ID NO: 36945 - protein, 126 aa, Artificial Sequence
  Chemically Synthesized
QVQLQESGGGLVQAGGSLRLSCAASGSISENGSMGWYRQAPGKEREFVASITYGGTTYYADSVKGRFTISRDNAKNTVYLQMNSLKPEDTAVYYCAAVRPGGPSYYYAYVYLFRYWGQGTQVTVSS

SEQ ID NO: 36946 - protein, 118 aa, Artificial Sequence
  Chemically Synthesized
QVQLQESGGGLVQAGGSLRLSCAASGTISNYLYMGWYRQAPGKEREFVASIGTGAITYYADSVKGRFTISRDNAKNTVYLQMNSLKPEDTAVYYCAVDRVEYSYHSYWGQGTQVTVSS

SEQ ID NO: 36947 - protein, 118 aa, Artificial Sequence
  Chemically Synthesized
QVQLQESGGGLVQAGGSLRLSCAASGSIFYRYTMGWYRQAPGKEREFVAAIAYGTTTYYADSVKGRFTISRDNAKNTVYLQMNSLKPEDTAVYYCAAQRTYGWRHTYWGQGTQVTVSS

SEQ ID NO: 36948 - protein, 126 aa, Artificial Sequence
  Chemically Synthesized
QVQLQESGGGLVQAGGSLRLSCAASGNIFRYADMGWYRQAPGKEREFVAGIASGAITYYADSVKGRFTISRDNAKNTVYLQMNSLKPEDTAVYYCAVADDADRTQPRLSDRPHLYWGQGTQVTVSS

SEQ ID NO: 36949 - protein, 125 aa, Artificial Sequence
  Chemically Synthesized
QVQLQESGGGLVQAGGSLRLSCAASGYISQQGYMGWYRQAPGKEREFVATINDGGTTNYADSVKGRFTISRDNAKNTVYLQMNSLKPEDTAVYYCAAFDIGPYDIYSHKYSTFYWGQGTQVTVSS

SEQ ID NO: 36950 - protein, 119 aa, Artificial Sequence
  Chemically Synthesized
QVQLQESGGGLVQAGGSLRLSCAASGNIFYGYSMGWYRQAPGKEREFVAGITVGTNTYYADSVKGRFTISRDNAKNTVYLQMNSLKPEDTAVYYCAVLYLRRRDIHRYWGQGTQVTVSS

SEQ ID NO: 36951 - protein, 118 aa, Artificial Sequence
  Chemically Synthesized
QVQLQESGGGLVQAGGSLRLSCAASGYIFPYNPMGWYRQAPGKERELVATISRGAITNYADSVKGRFTISRDNAKNTVYLQMNSLKPEDTAVYYCAARGVRYRWHVYWGQGTQVTVSS

SEQ ID NO: 36952 - protein, 117 aa, Artificial Sequence
  Chemically Synthesized
QVQLQESGGGLVQAGGSLRLSCAASGTIFPWGYMGWYRQAPGKEREFVAGISVGSITNYADSVKGRFTISRDNAKNTVYLQMNSLKPEDTAVYYCAVYRWYYYHAYWGQGTQVTVSS

SEQ ID NO: 36953 - protein, 118 aa, Artificial Sequence
  Chemically Synthesized
QVQLQESGGGLVQAGGSLRLSCAASGTIFAASNMGWYRQAPGKERELVAAISRGGNTNYADSVKGRFTISRDNAKNTVYLQMNSLKPEDTAVYYCAVLYGVWQYHWYWGQGTQVTVSS

SEQ ID NO: 36954 - protein, 118 aa, Artificial Sequence
  Chemically Synthesized
QVQLQESGGGLVQAGGSLRLSCAASGTIFKYSRMGWYRQAPGKEREFVASINWGATTYYADSVKGRFTISRDNAKNTVYLQMNSLKPEDTAVYYCAVRRYYDFTYRYWGQGTQVTVSS

SEQ ID NO: 36955 - protein, 118 aa, Artificial Sequence
  Chemically Synthesized
QVQLQESGGGLVQAGGSLRLSCAASGYIFAGESMGWYRQAPGKEREFVASIATGSSTYYADSVKGRFTISRDNAKNTVYLQMNSLKPEDTAVYYCAADGAFASYHVYWGQGTQVTVSS

SEQ ID NO: 36956 - protein, 126 aa, Artificial Sequence
  Chemically Synthesized
QVQLQESGGGLVQAGGSLRLSCAASGTISVPSWMGWYRQAPGKERELVAAINGGTNTNYADSVKGRFTISRDNAKNTVYLQMNSLKPEDTAVYYCAVRYLDADYGAYRDEVTHGYWGQGTQVTVSS

SEQ ID NO: 36957 - protein, 122 aa, Artificial Sequence
  Chemically Synthesized
QVQLQESGGGLVQAGGSLRLSCAASGTISEGYSMGWYRQAPGKEREFVAAISHGTSTYYADSVKGRFTISRDNAKNTVYLQMNSLKPEDTAVYYCAVYYLIYLRSEARLYYWGQGTQVTVSS

SEQ ID NO: 36958 - protein, 117 aa, Artificial Sequence
  Chemically Synthesized
QVQLQESGGGLVQAGGSLRLSCAASGNTMGWYRQAPGKEREFVASINWGASTYYADSVKGRFTISRDNAKNTVYLQMNSLKPEDTAVYYCAARAYDTYDQRWDLDYWGQGTQVTVSS

SEQ ID NO: 36959 - protein, 118 aa, Artificial Sequence
  Chemically Synthesized
QVQLQESGGGLVQAGGSLRLSCAASGSISNYSRMGWYRQAPGKEREFVAGIDHGGITYYADSVKGRFTISRDNAKNTVYLQMNSLKPEDTAVYYCAVTKIYTPWHYYWGQGTQVTVSS

SEQ ID NO: 36960 - protein, 118 aa, Artificial Sequence
  Chemically Synthesized
QVQLQESGGGLVQAGGSLRLSCAASGTISDDYYMGWYRQAPGKERELVAAIGYGTTTNYADSVKGRFTISRDNAKNTVYLQMNSLKPEDTAVYYCAVYYAYVTTHFYWGQGTQVTVSS

SEQ ID NO: 36961 - protein, 118 aa, Artificial Sequence
  Chemically Synthesized
QVQLQESGGGLVQAGGSLRLSCAASGNISYLVYMGWYRQAPGKEREFVAGINAGTSTNYADSVKGRFTISRDNAKNTVYLQMNSLKPEDTAVYYCAVWTQDDVTHDYWGQGTQVTVSS

SEQ ID NO: 36962 - protein, 119 aa, Artificial Sequence
  Chemically Synthesized
QVQLQESGGGLVQAGGSLRLSCAASGSIFPVYYMGWYRQAPGKERELVAGISYGGTTNYADSVKGRFTISRDNAKNTVYLQMNSLKPEDTAVYYCAVRRTYYYYHHAYWGQGTQVTVSS

SEQ ID NO: 36963 - protein, 121 aa, Artificial Sequence
  Chemically Synthesized
QVQLQESGGGLVQAGGSLRLSCAASGIFLLVVMGWYRQAPGKEREFVATISTGANTNYADSVKGRFTISRDNAKNTVYLQMNSLKPEDTAVYYCAVTTRLSNDTTYSLQYWGQGTQVTVSS

SEQ ID NO: 36964 - protein, 118 aa, Artificial Sequence
  Chemically Synthesized
QVQLQESGGGLVQAGGSLRLSCAASGTIFPPQAMGWYRQAPGKERELVASIADGSTTYYADSVKGRFTISRDNAKNTVYLQMNSLKPEDTAVYYCAADLYSEFAYSYWGQGTQVTVSS

SEQ ID NO: 36965 - protein, 118 aa, Artificial Sequence
  Chemically Synthesized
QVQLQESGGGLVQAGGSLRLSCAASGTIFRVARMGWYRQAPGKERELVASINGGGSTYYADSVKGRFTISRDNAKNTVYLQMNSLKPEDTAVYYCAVERGYRNTLVYWGQGTQVTVSS

SEQ ID NO: 36966 - protein, 118 aa, Artificial Sequence
  Chemically Synthesized
QVQLQESGGGLVQAGGSLRLSCAASGNIFWPFQMGWYRQAPGKERELVATIGGGTTTYYADSVKGRFTISRDNAKNTVYLQMNSLKPEDTAVYYCAAWYTYVYALVYWGQGTQVTVSS

SEQ ID NO: 36967 - protein, 118 aa, Artificial Sequence
  Chemically Synthesized
QVQLQESGGGLVQAGGSLRLSCAASGTISPGYVMGWYRQAPGKEREFVAAINFGTTTNYADSVKGRFTISRDNAKNTVYLQMNSLKPEDTAVYYCAVSYLPYFVFRYWGQGTQVTVSS

SEQ ID NO: 36968 - protein, 119 aa, Artificial Sequence
  Chemically Synthesized
QVQLQESGGGLVQAGGSLRLSCAASGSIFPGYYMGWYRQAPGKEREFVATIGYGAITYYADSVKGRFTISRDNAKNTVYLQMNSLKPEDTAVYYCAVRAFSGTRNFRYWGQGTQVTVSS

SEQ ID NO: 36969 - protein, 122 aa, Artificial Sequence
  Chemically Synthesized
QVQLQESGGGLVQAGGSLRLSCAASGTISGDDDMGWYRQAPGKERELVATIGSGSNTYYADSVKGRFTISRDNAKNTVYLQMNSLKPEDTAVYYCAAFEDLPVGDYIYHDYWGQGTQVTVSS

SEQ ID NO: 36970 - protein, 111 aa, Artificial Sequence
  Chemically Synthesized
QVQLQESGGGLVQAGGSLRLSCAASGTISDSDIMGWYRQAPGKEREFVAGISRGSITNYADSVKGRFTISRDNAKNTVYLQMNSLKPEDTAVYYCAGHTYWGQGTQVTVSS

SEQ ID NO: 36971 - protein, 112 aa, Artificial Sequence
  Chemically Synthesized
QVQLQESGGGLVQAGGSLRLSCAASGNIFYYAYMGWYRQAPGKERELVAGISTGTITNYADSVKGRFTISRDNAKNTVYLQMNSLKPEDTAVYYCAAVHWYWGQGTQVTVSS

SEQ ID NO: 36972 - protein, 126 aa, Artificial Sequence
  Chemically Synthesized
QVQLQESGGGLVQAGGSLRLSCAASGNISATSYMGWYRQAPGKERELVAAIASGGTTYYADSVKGRFTISRDNAKNTVYLQMNSLKPEDTAVYYCAVVYPYNTAYQRTPPSDHAYWGQGTQVTVSS

SEQ ID NO: 36973 - protein, 126 aa, Artificial Sequence
  Chemically Synthesized
QVQLQESGGGLVQAGGSLRLSCAASGNIFRPQVMGWYRQAPGKERELVAGISEGSTTYYADSVKGRFTISRDNAKNTVYLQMNSLKPEDTAVYYCAAFEANLSDIPQHRYRDLEYWGQGTQVTVSS

SEQ ID NO: 36974 - protein, 118 aa, Artificial Sequence
  Chemically Synthesized
QVQLQESGGGLVQAGGSLRLSCAASGTIFDGADMGWYRQAPGKEREFVATITDGAITYYADSVKGRFTISRDNAKNTVYLQMNSLKPEDTAVYYCAVPPGEGVGHVYWGQGTQVTVSS

SEQ ID NO: 36975 - protein, 122 aa, Artificial Sequence
  Chemically Synthesized
QVQLQESGGGLVQAGGSLRLSCAASGNISGPTKMGWYRQAPGKEREFVAGIDDGASTYYADSVKGRFTISRDNAKNTVYLQMNSLKPEDTAVYYCAVIVWSYANSGLLYSYWGQGTQVTVSS

SEQ ID NO: 36976 - protein, 125 aa, Artificial Sequence
  Chemically Synthesized
QVQLQESGGGLVQAGGSLRLSCAASGYISLTVYMGWYRQAPGKERELVASINLGTNTYYADSVKGRFTISRDNAKNTVYLQMNSLKPEDTAVYYCAARDQYRYVTTTVVVRTIYWGQGTQVTVSS

SEQ ID NO: 36977 - protein, 116 aa, Artificial Sequence
  Chemically Synthesized
QVQLQESGGGLVQAGGSLRLSCAASGNIFDVYHMGWYRQAPGKERELVAGINDGTSTNYADSVKGRFTISRDNAKNTVYLQMNSLKPEDTAVYYCAVGYVRAHHYWGQGTQVTVSS

SEQ ID NO: 36978 - protein, 122 aa, Artificial Sequence
  Chemically Synthesized
QVQLQESGGGLVQAGGSLRLSCAASGNISYSYIMGWYRQAPGKERELVATIAFGSITYYADSVKGRFTISRDNAKNTVYLQMNSLKPEDTAVYYCAATVHYDNVPVYLLYYWGQGTQVTVSS

SEQ ID NO: 36979 - protein, 119 aa, Artificial Sequence
  Chemically Synthesized
QVQLQESGGGLVQAGGSLRLSCAASGTIFAAGYDMGWYRQAPGKERELVASISSGASTNYADSVKGRFTISRDNAKNTVYLQMNSLKPEDTAVYYCAAGAYYVYAYEYWGQGTQVTVSS

SEQ ID NO: 36980 - protein, 118 aa, Artificial Sequence
  Chemically Synthesized
QVQLQESGGGLVQAGGSLRLSCAASGNIFLHIWMGWYRQAPGKERELVASIDHGGITNYADSVKGRFTISRDNAKNTVYLQMNSLKPEDTAVYYCAAYPPRIDALVYWGQGTQVTVSS

SEQ ID NO: 36981 - protein, 122 aa, Artificial Sequence
  Chemically Synthesized
QVQLQESGGGLVQAGGSLRLSCAASGTIFRGYVMGWYRQAPGKERELVASIGDGSSTYYADSVKGRFTISRDNAKNTVYLQMNSLKPEDTAVYYCAVYRHQTSPYWNGYVYWGQGTQVTVSS

SEQ ID NO: 36982 - protein, 122 aa, Artificial Sequence
  Chemically Synthesized
QVQLQESGGGLVQAGGSLRLSCAASGNIFRTVYMGWYRQAPGKEREFVAGITVGTTTNYADSVKGRFTISRDNAKNTVYLQMNSLKPEDTAVYYCAAYTLSIYLRKGYHDYWGQGTQVTVSS

SEQ ID NO: 36983 - protein, 118 aa, Artificial Sequence
  Chemically Synthesized
QVQLQESGGGLVQAGGSLRLSCAASGYIFANFTMGWYRQAPGKERELVAGIGYGTSTYYADSVKGRFTISRDNAKNTVYLQMNSLKPEDTAVYYCAVAYDSYLSFPYWGQGTQVTVSS

SEQ ID NO: 36984 - protein, 126 aa, Artificial Sequence
  Chemically Synthesized
QVQLQESGGGLVQAGGSLRLSCAASGYISYGIDMGWYRQAPGKEREFVAGIDRGGTTNYADSVKGRFTISRDNAKNTVYLQMNSLKPEDTAVYYCAVWYAVGYDREDYVGIYLYYWGQGTQVTVSS

SEQ ID NO: 36985 - protein, 122 aa, Artificial Sequence
  Chemically Synthesized
QVQLQESGGGLVQAGGSLRLSCAASGTIFDSAIMGWYRQAPGKERELVAGINKGATTYYADSVKGRFTISRDNAKNTVYLQMNSLKPEDTAVYYCAATGWRSPFESVVHDYWGQGTQVTVSS

SEQ ID NO: 36986 - protein, 126 aa, Artificial Sequence
  Chemically Synthesized
QVQLQESGGGLVQAGGSLRLSCAASGTIFAYPSMGWYRQAPGKERELVAGISDGGTTNYADSVKGRFTISRDNAKNTVYLQMNSLKPEDTAVYYCAVENPSARTSHLPATPYHYYWGQGTQVTVSS

SEQ ID NO: 36987 - protein, 118 aa, Artificial Sequence
  Chemically Synthesized
QVQLQESGGGLVQAGGSLRLSCAASGNISNDLYMGWYRQAPGKEREFVAAIGYGGITYYADSVKGRFTISRDNAKNTVYLQMNSLKPEDTAVYYCAVNAPYYGPHAYWGQGTQVTVSS

SEQ ID NO: 36988 - protein, 126 aa, Artificial Sequence
  Chemically Synthesized
QVQLQESGGGLVQAGGSLRLSCAASGSISLRYIMGWYRQAPGKERELVATISYGASTNYADSVKGRFTISRDNAKNTVYLQMNSLKPEDTAVYYCAVRYAFVRRYSAKKTRSFQYWGQGTQVTVSS

SEQ ID NO: 36989 - protein, 118 aa, Artificial Sequence
  Chemically Synthesized
QVQLQESGGGLVQAGGSLRLSCAASGTIFGYADMGWYRQAPGKEREFVASISYGANTNYADSVKGRFTISRDNAKNTVYLQMNSLKPEDTAVYYCAAEQPYDYYYGYWGQGTQVTVSS

SEQ ID NO: 36990 - protein, 111 aa, Artificial Sequence
  Chemically Synthesized
QVQLQESGGGLVQAGGSLRLSCAASGTIFGYDTMGWYRQAPGKEREFVASITWGTNTNYADSVKGRFTISRDNAKNTVYLQMNSLKPEDTAVYYCAALFYWGQGTQVTVSS

SEQ ID NO: 36991 - protein, 108 aa, Artificial Sequence
  Chemically Synthesized
QVQLQESGGGLVQAGGSLRLSCAASGNISSSRMGWYRQAPGKEREFVATISYGANTYYADSVKGRFTISRDNAKNTVYLQMNSLKPEDTAVYYCAAYWGQGTQVTVSS

SEQ ID NO: 36992 - protein, 117 aa, Artificial Sequence
  Chemically Synthesized
QVQLQESGGGLVQAGGSLRLSCAASGTIFHDNGMGWYRQAPGKEREFVASIALGATTYYADSVKGRFTISRDNAKNTVYLQMNSLKPEDTAVYYCALTTLLLLRIYWGQGTQVTVSS

SEQ ID NO: 36993 - protein, 122 aa, Artificial Sequence
  Chemically Synthesized
QVQLQESGGGLVQAGGSLRLSCAASGNISQAISMGWYRQAPGKEREFVAGITAGGTTYYADSVKGRFTISRDNAKNTVYLQMNSLKPEDTAVYYCAALIAVAGRPTSLFYYWGQGTQVTVSS

SEQ ID NO: 36994 - protein, 122 aa, Artificial Sequence
  Chemically Synthesized
QVQLQESGGGLVQAGGSLRLSCAASGYIFLSYTMGWYRQAPGKEREFVAGIAWGAITYYADSVKGRFTISRDNAKNTVYLQMNSLKPEDTAVYYCAVAADRSHVQPRYHSYWGQGTQVTVSS

SEQ ID NO: 36995 - protein, 117 aa, Artificial Sequence
  Chemically Synthesized
QVQLQESGGGLVQAGGSLRLSCAASGSISSYWYMGWYRQAPGKEREFVATIDAGSSTNYADSVKGRFTISRDNAKNTVYLQMNSLKPEDTAVYYCAVRTLRYNDIYWGQGTQVTVSS

SEQ ID NO: 36996 - protein, 118 aa, Artificial Sequence
  Chemically Synthesized
QVQLQESGGGLVQAGGSLRLSCAASGSIFQQYDMGWYRQAPGKERELVATINSGSTTYYADSVKGRFTISRDNAKNTVYLQMNSLKPEDTAVYYCAVWNYAVTRYYYWGQGTQVTVSS

SEQ ID NO: 36997 - protein, 122 aa, Artificial Sequence
  Chemically Synthesized
QVQLQESGGGLVQAGGSLRLSCAASGNIFQLDYMGWYRQAPGKEREFVAGIGRGASTNYADSVKGRFTISRDNAKNTVYLQMNSLKPEDTAVYYCAAYFYHQGDDDYSFRYWGQGTQVTVSS

SEQ ID NO: 36998 - protein, 126 aa, Artificial Sequence
  Chemically Synthesized
QVQLQESGGGLVQAGGSLRLSCAASGNISLPYLMGWYRQAPGKEREFVASINYGGTTNYADSVKGRFTISRDNAKNTVYLQMNSLKPEDTAVYYCAAYYEYTYGHYYPRERGLLYWGQGTQVTVSS

SEQ ID NO: 36999 - protein, 125 aa, Artificial Sequence
  Chemically Synthesized
QVQLQESGGGLVQAGGSLRLSCAASGSISWQSRMGWYRQAPGKERELVAGIVTVVLPYADSVKGRFTISRDNAKNTVYLQMNSLKPEDTAVYYCAVTSNYTVYVSPQFGHSFYYWGQGTQVTVSS

SEQ ID NO: 37000 - protein, 108 aa, Artificial Sequence
  Chemically Synthesized
QVQLQESGGGLVQAGGSLRLSCAASGTIFFSTMGWYRQAPGKERELVASIANGSSTYYADSVKGRFTISRDNAKNTVYLQMNSLKPEDTAVYYCALYWGQGTQVTVSS

SEQ ID NO: 37001 - protein, 118 aa, Artificial Sequence
  Chemically Synthesized
QVQLQESGGGLVQAGGSLRLSCAASGNIFAYGAMGWYRQAPGKEREFVATIAYGATTNYADSVKGRFTISRDNAKNTVYLQMNSLKPEDTAVYYCAVGEKLSGQYYYWGQGTQVTVSS

SEQ ID NO: 37002 - protein, 122 aa, Artificial Sequence
  Chemically Synthesized
QVQLQESGGGLVQAGGSLRLSCAASGTIFTAIYMGWYRQAPGKEREFVAGITEGSNTYYADSVKGRFTISRDNAKNTVYLQMNSLKPEDTAVYYCAAVITYHTLKYPRHLYWGQGTQVTVSS

SEQ ID NO: 37003 - protein, 126 aa, Artificial Sequence
  Chemically Synthesized
QVQLQESGGGLVQAGGSLRLSCAASGTISWLDDMGWYRQAPGKEREFVAAITHGTITNYADSVKGRFTISRDNAKNTVYLQMNSLKPEDTAVYYCAAYRRGGPPPYAYGGLDHWYWGQGTQVTVSS

SEQ ID NO: 37004 - protein, 118 aa, Artificial Sequence
  Chemically Synthesized
QVQLQESGGGLVQAGGSLRLSCAASGYIFGLTGMGWYRQAPGKEREFVAAIDVGGTTNYADSVKGRFTISRDNAKNTVYLQMNSLKPEDTAVYYCAVQLDRGYIHGYWGQGTQVTVSS

SEQ ID NO: 37005 - protein, 118 aa, Artificial Sequence
  Chemically Synthesized
QVQLQESGGGLVQAGGSLRLSCAASGTIFRYTRMGWYRQAPGKERELVATINDGSSTYYADSVKGRFTISRDNAKNTVYLQMNSLKPEDTAVYYCAAYWVRWWRFTYWGQGTQVTVSS

SEQ ID NO: 37006 - protein, 117 aa, Artificial Sequence
  Chemically Synthesized
QVQLQESGGGLVQAGGSLRLSCAASGSISWIVRMGWYRQAPGKERELVAAIGTGSTTYYADSVKGRFTISRDNAKNTVYLQMNSLKPEDTAVYYCAAVVGIAFYGYWGQGTQVTVSS

SEQ ID NO: 37007 - protein, 121 aa, Artificial Sequence
  Chemically Synthesized
QVQLQESGGGLVQAGGSLRLSCAASGSISYFIHMGWYRQAPGKEREFVATIDVGGTTNYADSVKGRFTISRDNAKNTVYLQMNSLKPEDTAVYYCAVKYGGDPVSCTRIYWGQGTQVTVSS

SEQ ID NO: 37008 - protein, 119 aa, Artificial Sequence
  Chemically Synthesized
QVQLQESGGGLVQAGGSLRLSCAASGSLVLTMGWYRQAPGKEREFVATIGFGTITYYADSVKGRFTISRDNAKNTVYLQMNSLKPEDTAVYYCAVVRPVVTVYKQYYYWGQGTQVTVSS

SEQ ID NO: 37009 - protein, 117 aa, Artificial Sequence
  Chemically Synthesized
QVQLQESGGGLVQAGGSLRLSCAASGNISIRQSMGWYRQAPGKEREFVPLLVTVVLPYADSVKGRFTISRDNAKNTVYLQMNSLKPEDTAVYYCAVDYSYYRTFLYWGQGTQVTVSS

SEQ ID NO: 37010 - protein, 121 aa, Artificial Sequence
  Chemically Synthesized
QVQLQESGGGLVQAGGSLRLSCAASGTIFSFCMGWYRQAPGKERELVASIGRGASTYYADSVKGRFTISRDNAKNTVYLQMNSLKPEDTAVYYCAVQSAYDLSPVTGHVYWGQGTQVTVSS

SEQ ID NO: 37011 - protein, 116 aa, Artificial Sequence
  Chemically Synthesized
QVQLQESGGGLVQAGGSLRLSCAASGNIFYSDWMGWYRQAPGKERELVAAISVGGSTYYADSVKGRFTISRDNAKNTVYLQMNSLKPEDTAVYYCAVDPYGLHPYWGQGTQVTVSS

SEQ ID NO: 37012 - protein, 115 aa, Artificial Sequence
  Chemically Synthesized
QVQLQESGGGLVQAGGSLRLSCAASGNISYVGYMGWYRQAPGKERELVATIDPGSNTNYADSVKGRFTISRDNAKNTVYLQMNSLKPEDTAVYYCALTTTVVLYWGQGTQVTVSS

SEQ ID NO: 37013 - protein, 121 aa, Artificial Sequence
  Chemically Synthesized
QVQLQESGGGLVQAGGSLRLSCAASGNISRFPWMGWYRQAPGKEREFVAGIAYGGTTNYADSVKGRFTISRDNAKNTVYLQMNSLKPEDTAVYYCAVPSVFWFLRLGRIYWGQGTQVTVSS

SEQ ID NO: 37014 - protein, 114 aa, Artificial Sequence
  Chemically Synthesized
QVQLQESGGGLVQAGGSLRLSCAASGTIFGTYYMGWYRQAPGKEREFVATIGGGGTTYYADSVKGRFTISRDNAKNTVYLQMNSLKPEDTAVYYCAVWAVWYYWGQGTQVTVSS

SEQ ID NO: 37015 - protein, 122 aa, Artificial Sequence
  Chemically Synthesized
QVQLQESGGGLVQAGGSLRLSCAASGNISNAYDMGWYRQAPGKERELVAAITTGTITYYADSVKGRFTISRDNAKNTVYLQMNSLKPEDTAVYYCAVLRASNKYRDGPYTYWGQGTQVTVSS

SEQ ID NO: 37016 - protein, 118 aa, Artificial Sequence
  Chemically Synthesized
QVQLQESGGGLVQAGGSLRLSCAASGTISQYGNMGWYRQAPGKERELVAGIGSGSTTNYADSVKGRFTISRDNAKNTVYLQMNSLKPEDTAVYYCAAGSGTVAPYTYWGQGTQVTVSS

SEQ ID NO: 37017 - protein, 115 aa, Artificial Sequence
  Chemically Synthesized
QVQLQESGGGLVQAGGSLRLSCAASGSIFLLSDMGWYRQAPGKEREFVAGIGGVVIPYADSVKGRFTISRDNAKNTVYLQMNSLKPEDTAVYYCAFTRTTTTFYWGQGTQVTVSS

SEQ ID NO: 37018 - protein, 122 aa, Artificial Sequence
  Chemically Synthesized
QVQLQESGGGLVQAGGSLRLSCAASGYISPYSDMGWYRQAPGKERELVAAISVGATTNYADSVKGRFTISRDNAKNTVYLQMNSLKPEDTAVYYCAAGTGRYPSYDYSHFYWGQGTQVTVSS

SEQ ID NO: 37019 - protein, 123 aa, Artificial Sequence
  Chemically Synthesized
QVQLQESGGGLVQAGGSLRLSCAASGYIFGDYAMGWYRQAPGKERELVAAIGYGTITNYADSVKGRFTISRDNAKNTVYLQMNSLKPEDTAVYYCAAYRFGGISYGPSSSFYWGQGTQVTVSS

SEQ ID NO: 37020 - protein, 122 aa, Artificial Sequence
  Chemically Synthesized
QVQLQESGGGLVQAGGSLRLSCAASGNISAGTMGWYRQAPGKEREFVAAINYGAITYYADSVKGRFTISRDNAKNTVYLQMNSLKPEDTAVYYCAVYRDSYATPGRYFHAYWGQGTQVTVSS

SEQ ID NO: 37021 - protein, 122 aa, Artificial Sequence
  Chemically Synthesized
QVQLQESGGGLVQAGGSLRLSCAASGTISFRNRMGWYRQAPGKEREFVAGITDGGSTYYADSVKGRFTISRDNAKNTVYLQMNSLKPEDTAVYYCAATSQVVEDAPNDYGYWGQGTQVTVSS

SEQ ID NO: 37022 - protein, 118 aa, Artificial Sequence
  Chemically Synthesized
QVQLQESGGGLVQAGGSLRLSCAASGSIFAIWRMGWYRQAPGKERELVATITGGSTTYYADSVKGRFTISRDNAKNTVYLQMNSLKPEDTAVYYCAVVTWGYIGFYYWGQGTQVTVSS

SEQ ID NO: 37023 - protein, 118 aa, Artificial Sequence
  Chemically Synthesized
QVQLQESGGGLVQAGGSLRLSCAASGSISGPRYMGWYRQAPGKEREFVATITDGGTTYYADSVKGRFTISRDNAKNTVYLQMNSLKPEDTAVYYCAVPYWYWLKHFYWGQGTQVTVSS

SEQ ID NO: 37024 - protein, 122 aa, Artificial Sequence
  Chemically Synthesized
QVQLQESGGGLVQAGGSLRLSCAASGTIFAGYFMGWYRQAPGKEREFVASINAGGNTNYADSVKGRFTISRDNAKNTVYLQMNSLKPEDTAVYYCAARDWVFYWVYRIFGYWGQGTQVTVSS

SEQ ID NO: 37025 - protein, 117 aa, Artificial Sequence
  Chemically Synthesized
QVQLQESGGGLVQAGGSLRLSCAASGTIFRYEEMGWYRQAPGKEREFVAAITSVVLPYADSVKGRFTISRDNAKNTVYLQMNSLKPEDTAVYYCAVYSYTIRDHRYWGQGTQVTVSS

SEQ ID NO: 37026 - protein, 126 aa, Artificial Sequence
  Chemically Synthesized
QVQLQESGGGLVQAGGSLRLSCAASGNISLSSLMGWYRQAPGKERELVAAINDGGITNYADSVKGRFTISRDNAKNTVYLQMNSLKPEDTAVYYCAANDSANRYSRRRGILYHWYWGQGTQVTVSS

SEQ ID NO: 37027 - protein, 126 aa, Artificial Sequence
  Chemically Synthesized
QVQLQESGGGLVQAGGSLRLSCAASGTISRFERMGWYRQAPGKEREFVATIDAGATTNYADSVKGRFTISRDNAKNTVYLQMNSLKPEDTAVYYCAAYFPDRGPFFDTVQYDFVYWGQGTQVTVSS

SEQ ID NO: 37028 - protein, 118 aa, Artificial Sequence
  Chemically Synthesized
QVQLQESGGGLVQAGGSLRLSCAASGTISYLQGMGWYRQAPGKEREFVAGISYGGSTYYADSVKGRFTISRDNAKNTVYLQMNSLKPEDTAVYYCAADTVPAVVYYYWGQGTQVTVSS

SEQ ID NO: 37029 - protein, 117 aa, Artificial Sequence
  Chemically Synthesized
QVQLQESGGGLVQAGGSLRLSCAASGSISSCCMGWYRQAPGKEREFVAGIDHGSNTNYADSVKGRFTISRDNAKNTVYLQMNSLKPEDTAVYYCAARRDDYVPFFYWGQGTQVTVSS

SEQ ID NO: 37030 - protein, 112 aa, Artificial Sequence
  Chemically Synthesized
QVQLQESGGGLVQAGGSLRLSCAASGNIFPLHEMGWYRQAPGKERELVAAISPGATTNYADSVKGRFTISRDNAKNTVYLQMNSLKPEDTAVYYCAADYTYWGQGTQVTVSS

SEQ ID NO: 37031 - protein, 122 aa, Artificial Sequence
  Chemically Synthesized
QVQLQESGGGLVQAGGSLRLSCAASGSIFDVGFMGWYRQAPGKERELVAAIGYGATTYYADSVKGRFTISRDNAKNTVYLQMNSLKPEDTAVYYCAAYLYYLSYGSYYYWYWGQGTQVTVSS

SEQ ID NO: 37032 - protein, 121 aa, Artificial Sequence
  Chemically Synthesized
QVQLQESGGGLVQAGGSLRLSCAASGTISWRGWMGWYRQAPGKERELVATIAHGSTNYADSVKGRFTISRDNAKNTVYLQMNSLKPEDTAVYYCAAKPYYWYRSPHYLVYWGQGTQVTVSS

SEQ ID NO: 37033 - protein, 122 aa, Artificial Sequence
  Chemically Synthesized
QVQLQESGGGLVQAGGSLRLSCAASGTIFKFGVMGWYRQAPGKEREFVAAITGGSNTYYADSVKGRFTISRDNAKNTVYLQMNSLKPEDTAVYYCAALTGPLTYLGYGHRYWGQGTQVTVSS

SEQ ID NO: 37034 - protein, 117 aa, Artificial Sequence
  Chemically Synthesized
QVQLQESGGGLVQAGGSLRLSCAASGSSMGWYRQAPGKERELVAGINQGSNTNYADSVKGRFTISRDNAKNTVYLQMNSLKPEDTAVYYCAVTTVDEYIFYFAHDYWGQGTQVTVSS

SEQ ID NO: 37035 - protein, 126 aa, Artificial Sequence
  Chemically Synthesized
QVQLQESGGGLVQAGGSLRLSCAASGYISDRFAMGWYRQAPGKERELVASIGAGGNTYYADSVKGRFTISRDNAKNTVYLQMNSLKPEDTAVYYCAAYGDPGYYAVAYLDSYLSYWGQGTQVTVSS

SEQ ID NO: 37036 - protein, 118 aa, Artificial Sequence
  Chemically Synthesized
QVQLQESGGGLVQAGGSLRLSCAASGSIFYLYIMGWYRQAPGKERELVAGINQGSSTYYADSVKGRFTISRDNAKNTVYLQMNSLKPEDTAVYYCAAYHPFYAGHTYWGQGTQVTVSS

SEQ ID NO: 37037 - protein, 118 aa, Artificial Sequence
  Chemically Synthesized
QVQLQESGGGLVQAGGSLRLSCAASGTIFTPYGMGWYRQAPGKEREFVAGIALGTNTNYADSVKGRFTISRDNAKNTVYLQMNSLKPEDTAVYYCAVHLPYFLGLYYWGQGTQVTVSS

SEQ ID NO: 37038 - protein, 121 aa, Artificial Sequence
  Chemically Synthesized
QVQLQESGGGLVQAGGSLRLSCAASGNIFYLYQMGWYRQAPGKEREFVASISDGSTTYYADSVKGRFTISRDNAKNTVYLQMNSLKPEDTAVYYCAVPQFVFGLLISLIYWGQGTQVTVSS

SEQ ID NO: 37039 - protein, 118 aa, Artificial Sequence
  Chemically Synthesized
QVQLQESGGGLVQAGGSLRLSCAASGSIFDIAYMGWYRQAPGKERELVASISLGGSTNYADSVKGRFTISRDNAKNTVYLQMNSLKPEDTAVYYCAVHLYYRWEYGYWGQGTQVTVSS

SEQ ID NO: 37040 - protein, 118 aa, Artificial Sequence
  Chemically Synthesized
QVQLQESGGGLVQAGGSLRLSCAASGTIFTYYTMGWYRQAPGKEREFVASIAYGASTYYADSVKGRFTISRDNAKNTVYLQMNSLKPEDTAVYYCAAVLYTAPTHGYWGQGTQVTVSS

SEQ ID NO: 37041 - protein, 122 aa, Artificial Sequence
  Chemically Synthesized
QVQLQESGGGLVQAGGSLRLSCAASGTISASEDMGWYRQAPGKERELVASIDAGSSTYYADSVKGRFTISRDNAKNTVYLQMNSLKPEDTAVYYCAAIYYRLYYDDSSFDYWGQGTQVTVSS

SEQ ID NO: 37042 - protein, 121 aa, Artificial Sequence
  Chemically Synthesized
QVQLQESGGGLVQAGGSLRLSCAASGYISDRTYMGWYRQAPGKERELVALLLVVLLPYADSVKGRFTISRDNAKNTVYLQMNSLKPEDTAVYYCAVDTYSVEYGDDPYQYWGQGTQVTVSS

SEQ ID NO: 37043 - protein, 110 aa, Artificial Sequence
  Chemically Synthesized
QVQLQESGGGLVQAGGSLRLSCAASGSIFDNRFMGWYRQAPGKEREFVATIDAGAITYYADSVKGRFTISRDNAKNTVYLQMNSLKPEDTAVYYCAAAYWGQGTQVTVSS

SEQ ID NO: 37044 - protein, 126 aa, Artificial Sequence
  Chemically Synthesized
QVQLQESGGGLVQAGGSLRLSCAASGNISYWKPMGWYRQAPGKERELVAGIAWGGSTYYADSVKGRFTISRDNAKNTVYLQMNSLKPEDTAVYYCAVVYARDDTAVWIYTADLQYWGQGTQVTVSS

SEQ ID NO: 37045 - protein, 118 aa, Artificial Sequence
  Chemically Synthesized
QVQLQESGGGLVQAGGSLRLSCAASGNISAGSYMGWYRQAPGKEREFVASIGQGANTNYADSVKGRFTISRDNAKNTVYLQMNSLKPEDTAVYYCAVDSRATYDHRYWGQGTQVTVSS

SEQ ID NO: 37046 - protein, 122 aa, Artificial Sequence
  Chemically Synthesized
QVQLQESGGGLVQAGGSLRLSCAASGSISWHYVMGWYRQAPGKERELVASIAGGTSTYYADSVKGRFTISRDNAKNTVYLQMNSLKPEDTAVYYCAVGLTRRLYWDYALGYWGQGTQVTVSS

SEQ ID NO: 37047 - protein, 122 aa, Artificial Sequence
  Chemically Synthesized
QVQLQESGGGLVQAGGSLRLSCAASGSISRFRTMGWYRQAPGKEREFVASIADGTSTYYADSVKGRFTISRDNAKNTVYLQMNSLKPEDTAVYYCAVQGWQGQSYAQIHHYWGQGTQVTVSS

SEQ ID NO: 37048 - protein, 118 aa, Artificial Sequence
  Chemically Synthesized
QVQLQESGGGLVQAGGSLRLSCAASGSISPTVYMGWYRQAPGKEREFVAAITQGTRYQYADSVKGRFTISRDNAKNTVYLQMNSLKPEDTAVYYCAVEFWYSSNHQYWGQGTQVTVSS

SEQ ID NO: 37049 - protein, 117 aa, Artificial Sequence
  Chemically Synthesized
QVQLQESGGGLVQAGGSLRLSCAASGTIFVTSRMGWYRQAPGKERELVASIDVGATTNYADSVKGRFTISRDNAKNTVYLQMNSLKPEDTAVYYCAAPTDDRDYRYWGQGTQVTVSS

SEQ ID NO: 37050 - protein, 117 aa, Artificial Sequence
  Chemically Synthesized
QVQLQESGGGLVQAGGSLRLSCAASGNIFGAGYMGWYRQAPGKEREFVATINVGGITNYADSVKGRFTISRDNAKNTVYLQMNSLKPEDTAVYYCAFSRLLFRTMYWGQGTQVTVSS

SEQ ID NO: 37051 - protein, 117 aa, Artificial Sequence
  Chemically Synthesized
QVQLQESGGGLVQAGGSLRLSCAASGYISPTGYMGWYRQAPGKERELVATIAFGTSTNYADSVKGRFTISRDNAKNTVYLQMNSLKPEDTAVYYCAAGWYSWVTFYWGQGTQVTVSS

SEQ ID NO: 37052 - protein, 121 aa, Artificial Sequence
  Chemically Synthesized
QVQLQESGGGLVQAGGSLRLSCAASGNISYVEAMGWYRQAPGKEREFVAGIARGTTYYADSVKGRFTISRDNAKNTVYLQMNSLKPEDTAVYYCAVEDTSADYYFYVHAYWGQGTQVTVSS

SEQ ID NO: 37053 - protein, 118 aa, Artificial Sequence
  Chemically Synthesized
QVQLQESGGGLVQAGGSLRLSCAASGNIFAADNMGWYRQAPGKEREFVAGIAHGANTNYADSVKGRFTISRDNAKNTVYLQMNSLKPEDTAVYYCAAPRTVTGYYYYWGQGTQVTVSS

SEQ ID NO: 37054 - protein, 116 aa, Artificial Sequence
  Chemically Synthesized
QVQLQESGGGLVQAGGSLRLSCAASGNIFGSLMGWYRQAPGKERELVASIVLVLTNYADSVKGRFTISRDNAKNTVYLQMNSLKPEDTAVYYCAVYVLGEHDHNYWGQGTQVTVSS

SEQ ID NO: 37055 - protein, 118 aa, Artificial Sequence
  Chemically Synthesized
QVQLQESGGGLVQAGGSLRLSCAASGTISREYYMGWYRQAPGKERELVAGIDYGGSTYYADSVKGRFTISRDNAKNTVYLQMNSLKPEDTAVYYCAVYLSIVRPFDYWGQGTQVTVSS

SEQ ID NO: 37056 - protein, 121 aa, Artificial Sequence
  Chemically Synthesized
QVQLQESGGGLVQAGGSLRLSCAASGSISRYSDMGWYRQAPGKERELVASIAYGAITNYADSVKGRFTISRDNAKNTVYLQMNSLKPEDTAVYYCAVYTTKDTLSTLVLYWGQGTQVTVSS

SEQ ID NO: 37057 - protein, 118 aa, Artificial Sequence
  Chemically Synthesized
QVQLQESGGGLVQAGGSLRLSCAASGNISDPTDMGWYRQAPGKERELVAGISDGTNTNYADSVKGRFTISRDNAKNTVYLQMNSLKPEDTAVYYCAVPFGEDYDLGYWGQGTQVTVSS

SEQ ID NO: 37058 - protein, 121 aa, Artificial Sequence
  Chemically Synthesized
QVQLQESGGGLVQAGGSLRLSCAASGYIFYRVNMGWYRQAPGKERELVASIDVGTNTNYADSVKGRFTISRDNAKNTVYLQMNSLKPEDTAVYYCAADSWYWDYVYVFAYWGQGTQVTVSS

SEQ ID NO: 37059 - protein, 115 aa, Artificial Sequence
  Chemically Synthesized
QVQLQESGGGLVQAGGSLRLSCAASGTIFTRVDMGWYRQAPGKEREFVAGIAGGSTTNYADSVKGRFTISRDNAKNTVYLQMNSLKPEDTAVYYCAATTTTLMYWGQGTQVTVSS

SEQ ID NO: 37060 - protein, 107 aa, Artificial Sequence
  Chemically Synthesized
QVQLQESGGGLVQAGGSLRLSCAASGTIFDGGGMGWYRQAPGKERELVAPYADSVKGRFTISRDNAKNTVYLQMNSLKPEDTAVYYCAVDRSGHPYWGQGTQVTVSS

SEQ ID NO: 37061 - protein, 126 aa, Artificial Sequence
  Chemically Synthesized
QVQLQESGGGLVQAGGSLRLSCAASGTISYTDTMGWYRQAPGKERELVASISSGTTTNYADSVKGRFTISRDNAKNTVYLQMNSLKPEDTAVYYCAASWGQRSRRRGNVGVYLAYWGQGTQVTVSS

SEQ ID NO: 37062 - protein, 125 aa, Artificial Sequence
  Chemically Synthesized
QVQLQESGGGLVQAGGSLRLSCAASGYISDYKFMGWYRQAPGKEREFVAGIDWGASTNYADSVKGRFTISRDNAKNTVYLQMNSLKPEDTAVYYCAADLQYSTNSSWLTVSGIYWGQGTQVTVSS

SEQ ID NO: 37063 - protein, 118 aa, Artificial Sequence
  Chemically Synthesized
QVQLQESGGGLVQAGGSLRLSCAASGNISYAWHMGWYRQAPGKERELVAGITHGGNTNYADSVKGRFTISRDNAKNTVYLQMNSLKPEDTAVYYCAVNYGVFGYFGYWGQGTQVTVSS

SEQ ID NO: 37064 - protein, 118 aa, Artificial Sequence
  Chemically Synthesized
QVQLQESGGGLVQAGGSLRLSCAASGTIFDYPFMGWYRQAPGKEREFVAAITNGGSTNYADSVKGRFTISRDNAKNTVYLQMNSLKPEDTAVYYCAADGVYDHSHFYWGQGTQVTVSS

SEQ ID NO: 37065 - protein, 118 aa, Artificial Sequence
  Chemically Synthesized
QVQLQESGGGLVQAGGSLRLSCAASGTIFRVQSMGWYRQAPGKEREFVAAIGVGGTTYYADSVKGRFTISRDNAKNTVYLQMNSLKPEDTAVYYCAVLQYYYHYHGYWGQGTQVTVSS

SEQ ID NO: 37066 - protein, 126 aa, Artificial Sequence
  Chemically Synthesized
QVQLQESGGGLVQAGGSLRLSCAASGSIFQYAYMGWYRQAPGKERELVATIGYGTSTYYADSVKGRFTISRDNAKNTVYLQMNSLKPEDTAVYYCAVPDVTWYGYYDAGQTALRYWGQGTQVTVSS

SEQ ID NO: 37067 - protein, 118 aa, Artificial Sequence
  Chemically Synthesized
QVQLQESGGGLVQAGGSLRLSCAASGTIFHNSYMGWYRQAPGKERELVASIAAGSTTYYADSVKGRFTISRDNAKNTVYLQMNSLKPEDTAVYYCAVRYLIGPYFYYWGQGTQVTVSS

SEQ ID NO: 37068 - protein, 118 aa, Artificial Sequence
  Chemically Synthesized
QVQLQESGGGLVQAGGSLRLSCAASGTISYALAMGWYRQAPGKEREFVATIGSGSTTNYADSVKGRFTISRDNAKNTVYLQMNSLKPEDTAVYYCAVTTEYFAEHSYWGQGTQVTVSS

SEQ ID NO: 37069 - protein, 125 aa, Artificial Sequence
  Chemically Synthesized
QVQLQESGGGLVQAGGSLRLSCAASGNISYTEVMGWYRQAPGKERELVASINYGGTTYYADSVKGRFTISRDNAKNTVYLQMNSLKPEDTAVYYCALWRDSKLFTCLTTTTTIYWGQGTQVTVSS

SEQ ID NO: 37070 - protein, 118 aa, Artificial Sequence
  Chemically Synthesized
QVQLQESGGGLVQAGGSLRLSCAASGTISRGSTMGWYRQAPGKERELVAAIGSGAITNYADSVKGRFTISRDNAKNTVYLQMNSLKPEDTAVYYCAVYISVGPLLPYWGQGTQVTVSS

SEQ ID NO: 37071 - protein, 116 aa, Artificial Sequence
  Chemically Synthesized
QVQLQESGGGLVQAGGSLRLSCAASGSISGAFVMGWYRQAPGKEREFVASITTGASTYYADSVKGRFTISRDNAKNTVYLQMNSLKPEDTAVYYCAAYTDQYYPYWGQGTQVTVSS

SEQ ID NO: 37072 - protein, 117 aa, Artificial Sequence
  Chemically Synthesized
QVQLQESGGGLVQAGGSLRLSCAASGSISSDGMGWYRQAPGKERELVAGIGSGSNTNYADSVKGRFTISRDNAKNTVYLQMNSLKPEDTAVYYCAAFLYDTTGFRYWGQGTQVTVSS

SEQ ID NO: 37073 - protein, 121 aa, Artificial Sequence
  Chemically Synthesized
QVQLQESGGGLVQAGGSLRLSCAASGTIFAGWSMGWYRQAPGKERELVAAIGDGTTTYYADSVKGRFTISRDNAKNTVYLQMNSLKPEDTAVYYCAADGTLDGGRPVVLYWGQGTQVTVSS

SEQ ID NO: 37074 - protein, 126 aa, Artificial Sequence
  Chemically Synthesized
QVQLQESGGGLVQAGGSLRLSCAASGSISVDDYMGWYRQAPGKEREFVAAIDYGSSTNYADSVKGRFTISRDNAKNTVYLQMNSLKPEDTAVYYCAAGITYTDYHSPYRFGIYGYWGQGTQVTVSS

SEQ ID NO: 37075 - protein, 122 aa, Artificial Sequence
  Chemically Synthesized
QVQLQESGGGLVQAGGSLRLSCAASGYIFDITYMGWYRQAPGKERELVAAIARGGITYYADSVKGRFTISRDNAKNTVYLQMNSLKPEDTAVYYCAARDFYSANPANPHPYWGQGTQVTVSS

SEQ ID NO: 37076 - protein, 122 aa, Artificial Sequence
  Chemically Synthesized
QVQLQESGGGLVQAGGSLRLSCAASGNIFYYRTMGWYRQAPGKERELVAAISRGTNTYYADSVKGRFTISRDNAKNTVYLQMNSLKPEDTAVYYCAVNARPYQPRYHPYGYWGQGTQVTVSS

SEQ ID NO: 37077 - protein, 122 aa, Artificial Sequence
  Chemically Synthesized
QVQLQESGGGLVQAGGSLRLSCAASGNISTGESMGWYRQAPGKERELVAGITIGSSTNYADSVKGRFTISRDNAKNTVYLQMNSLKPEDTAVYYCAANVQKDWEYYPDYDYWGQGTQVTVSS

SEQ ID NO: 37078 - protein, 121 aa, Artificial Sequence
  Chemically Synthesized
QVQLQESGGGLVQAGGSLRLSCAASGTISYRGPMGWYRQAPGKEREFVAVLIWVLLPYADSVKGRFTISRDNAKNTVYLQMNSLKPEDTAVYYCAATHGKTSDGIRYLGYWGQGTQVTVSS

SEQ ID NO: 37079 - protein, 118 aa, Artificial Sequence
  Chemically Synthesized
QVQLQESGGGLVQAGGSLRLSCAASGSISGYGIMGWYRQAPGKEREFVATISSGTNTNYADSVKGRFTISRDNAKNTVYLQMNSLKPEDTAVYYCAVRFSNDTNLSYWGQGTQVTVSS

SEQ ID NO: 37080 - protein, 122 aa, Artificial Sequence
  Chemically Synthesized
QVQLQESGGGLVQAGGSLRLSCAASGTIFAADSMGWYRQAPGKERELVAGINRGGITYYADSVKGRFTISRDNAKNTVYLQMNSLKPEDTAVYYCAAYLSDVVTGDTTLQYWGQGTQVTVSS

SEQ ID NO: 37081 - protein, 117 aa, Artificial Sequence
  Chemically Synthesized
QVQLQESGGGLVQAGGSLRLSCAASGTISSLTMGWYRQAPGKEREFVASITYGTNTYYADSVKGRFTISRDNAKNTVYLQMNSLKPEDTAVYYCAADNSSTRLFAYWGQGTQVTVSS

SEQ ID NO: 37082 - protein, 118 aa, Artificial Sequence
  Chemically Synthesized
QVQLQESGGGLVQAGGSLRLSCAASGSISNYPYMGWYRQAPGKERELVASISGGGNTNYADSVKGRFTISRDNAKNTVYLQMNSLKPEDTAVYYCAVGDSDTLLYDYWGQGTQVTVSS

SEQ ID NO: 37083 - protein, 122 aa, Artificial Sequence
  Chemically Synthesized
QVQLQESGGGLVQAGGSLRLSCAASGSISPYGYMGWYRQAPGKERELVAGISQGSITYYADSVKGRFTISRDNAKNTVYLQMNSLKPEDTAVYYCAAITTSSDIPRLLYGYWGQGTQVTVSS

SEQ ID NO: 37084 - protein, 118 aa, Artificial Sequence
  Chemically Synthesized
QVQLQESGGGLVQAGGSLRLSCAASGYIFTYYIMGWYRQAPGKERELVASISEGGSTNYADSVKGRFTISRDNAKNTVYLQMNSLKPEDTAVYYCAARFTAHYGYDYWGQGTQVTVSS

SEQ ID NO: 37085 - protein, 124 aa, Artificial Sequence
  Chemically Synthesized
QVQLQESGGGLVQAGGSLRLSCAASGYISDQLEMGWYRQAPGKEREFVASISSVVLPYADSVKGRFTISRDNAKNTVYLQMNSLKPEDTAVYYCAATLRTLLSWGYSLLLTMYWGQGTQVTVSS

SEQ ID NO: 37086 - protein, 118 aa, Artificial Sequence
  Chemically Synthesized
QVQLQESGGGLVQAGGSLRLSCAASGTIFYGKRMGWYRQAPGKEREFVAGITRGGTTYYADSVKGRFTISRDNAKNTVYLQMNSLKPEDTAVYYCAVTVAWYQYYDYWGQGTQVTVSS

SEQ ID NO: 37087 - protein, 118 aa, Artificial Sequence
  Chemically Synthesized
QVQLQESGGGLVQAGGSLRLSCAASGYIFKVSDMGWYRQAPGKEREFVAGITGGTITNYADSVKGRFTISRDNAKNTVYLQMNSLKPEDTAVYYCAVPIPIRYQYSYWGQGTQVTVSS

SEQ ID NO: 37088 - protein, 121 aa, Artificial Sequence
  Chemically Synthesized
QVQLQESGGGLVQAGGSLRLSCAASGYISPTYYMGWYRQAPGKEREFVAGIAIGAITYYADSVKGRFTISRDNAKNTVYLQMNSLKPEDTAVYYCAAYDYDDVGASYHYYWGQGTQVTVSS

SEQ ID NO: 37089 - protein, 121 aa, Artificial Sequence
  Chemically Synthesized
QVQLQESGGGLVQAGGSLRLSCAASGNIFVYYSMGWYRQAPGKEREFVAAISVGGITYYADSVKGRFTISRDNAKNTVYLQMNSLKPEDTAVYYCAVGQDRYDDGSVVIYWGQGTQVTVSS

SEQ ID NO: 37090 - protein, 118 aa, Artificial Sequence
  Chemically Synthesized
QVQLQESGGGLVQAGGSLRLSCAASGSIFPGKYMGWYRQAPGKEREFVAGINYGAITYYADSVKGRFTISRDNAKNTVYLQMNSLKPEDTAVYYCAVYGENRAFHYYWGQGTQVTVSS

SEQ ID NO: 37091 - protein, 117 aa, Artificial Sequence
  Chemically Synthesized
QVQLQESGGGLVQAGGSLRLSCAASGTIFYTGDMGWYRQAPGKEREFVATINYGSSTYYADSVKGRFTISRDNAKNTVYLQMNSLKPEDTAVYYCAVQNVTGTALYWGQGTQVTVSS

SEQ ID NO: 37092 - protein, 118 aa, Artificial Sequence
  Chemically Synthesized
QVQLQESGGGLVQAGGSLRLSCAASGNISHPGVMGWYRQAPGKEREFVAGIGSGTTTNYADSVKGRFTISRDNAKNTVYLQMNSLKPEDTAVYYCAAYYANIYTLDYWGQGTQVTVSS

SEQ ID NO: 37093 - protein, 122 aa, Artificial Sequence
  Chemically Synthesized
QVQLQESGGGLVQAGGSLRLSCAASGTISEGNPMGWYRQAPGKERELVAAINRGTNTYYADSVKGRFTISRDNAKNTVYLQMNSLKPEDTAVYYCAVHRVYNEDPDYSFTYWGQGTQVTVSS

SEQ ID NO: 37094 - protein, 126 aa, Artificial Sequence
  Chemically Synthesized
QVQLQESGGGLVQAGGSLRLSCAASGTISRYGTMGWYRQAPGKERELVAGIAYGGNTYYADSVKGRFTISRDNAKNTVYLQMNSLKPEDTAVYYCAVGGQGYPPRVDRYSPDYRYWGQGTQVTVSS

SEQ ID NO: 37095 - protein, 122 aa, Artificial Sequence
  Chemically Synthesized
QVQLQESGGGLVQAGGSLRLSCAASGTISDVDKMGWYRQAPGKERELVAGIDDGGTTYYADSVKGRFTISRDNAKNTVYLQMNSLKPEDTAVYYCAVYDTVKDHIGDVYDYWGQGTQVTVSS

SEQ ID NO: 37096 - protein, 122 aa, Artificial Sequence
  Chemically Synthesized
QVQLQESGGGLVQAGGSLRLSCAASGNISTWAGMGWYRQAPGKERELVAAINAGSTTNYADSVKGRFTISRDNAKNTVYLQMNSLKPEDTAVYYCAADRPLDSDSLYIYEYWGQGTQVTVSS

SEQ ID NO: 37097 - protein, 117 aa, Artificial Sequence
  Chemically Synthesized
QVQLQESGGGLVQAGGSLRLSCAASGYISQGYDMGWYRQAPGKERELVAAIGEVVLPYADSVKGRFTISRDNAKNTVYLQMNSLKPEDTAVYYCAVPDRVASLHHYWGQGTQVTVSS

SEQ ID NO: 37098 - protein, 122 aa, Artificial Sequence
  Chemically Synthesized
QVQLQESGGGLVQAGGSLRLSCAASGTISPDLIMGWYRQAPGKEREFVASIGNGANTYYADSVKGRFTISRDNAKNTVYLQMNSLKPEDTAVYYCAARGDGEAQHVYHYLYWGQGTQVTVSS

SEQ ID NO: 37099 - protein, 118 aa, Artificial Sequence
  Chemically Synthesized
QVQLQESGGGLVQAGGSLRLSCAASGNISGDATMGWYRQAPGKERELVASIAIGGNTYYADSVKGRFTISRDNAKNTVYLQMNSLKPEDTAVYYCAANHTRSTPHYYWGQGTQVTVSS

SEQ ID NO: 37100 - protein, 121 aa, Artificial Sequence
  Chemically Synthesized
QVQLQESGGGLVQAGGSLRLSCAASGYISSSSVMGWYRQAPGKEREFVAGIGNGTTTNYADSVKGRFTISRDNAKNTVYLQMNSLKPEDTAVYYCALNWTTTNRTGLGLYWGQGTQVTVSS

SEQ ID NO: 37101 - protein, 126 aa, Artificial Sequence
  Chemically Synthesized
QVQLQESGGGLVQAGGSLRLSCAASGNIFPDVYMGWYRQAPGKERELVAAITSGANTYYADSVKGRFTISRDNAKNTVYLQMNSLKPEDTAVYYCAAYYAWSYYVDATDFGYLRYWGQGTQVTVSS

SEQ ID NO: 37102 - protein, 126 aa, Artificial Sequence
  Chemically Synthesized
QVQLQESGGGLVQAGGSLRLSCAASGTIFLVIVMGWYRQAPGKERELVATISNGSSTNYADSVKGRFTISRDNAKNTVYLQMNSLKPEDTAVYYCAAYQWNPFLPRDAYRQRHGYWGQGTQVTVSS

SEQ ID NO: 37103 - protein, 121 aa, Artificial Sequence
  Chemically Synthesized
QVQLQESGGGLVQAGGSLRLSCAASGTIFRRLDMGWYRQAPGKERELVAAIGWGTTTNYADSVKGRFTISRDNAKNTVYLQMNSLKPEDTAVYYCAARYRRYSYYSYYYYWGQGTQVTVSS

SEQ ID NO: 37104 - protein, 124 aa, Artificial Sequence
  Chemically Synthesized
QVQLQESGGGLVQAGGSLRLSCAASGTISGDWEMGWYRQAPGKERELVAGITVLLPYADSVKGRFTISRDNAKNTVYLQMNSLKPEDTAVYYCAAGQHGIYHRIGPGYTPFTYWGQGTQVTVSS

SEQ ID NO: 37105 - protein, 112 aa, Artificial Sequence
  Chemically Synthesized
QVQLQESGGGLVQAGGSLRLSCAASGYISASLMGWYRQAPGKERELVAMLLPYADSVKGRFTISRDNAKNTVYLQMNSLKPEDTAVYYCAVVYGDDRTLVYWGQGTQVTVSS

SEQ ID NO: 37106 - protein, 118 aa, Artificial Sequence
  Chemically Synthesized
QVQLQESGGGLVQAGGSLRLSCAASGTIFVWGVMGWYRQAPGKERELVAAITGGGITYYADSVKGRFTISRDNAKNTVYLQMNSLKPEDTAVYYCAVAGGGLYDFDYWGQGTQVTVSS

SEQ ID NO: 37107 - protein, 118 aa, Artificial Sequence
  Chemically Synthesized
QVQLQESGGGLVQAGGSLRLSCAASGYIFWAPRMGWYRQAPGKEREFVAGIGKGTNTNYADSVKGRFTISRDNAKNTVYLQMNSLKPEDTAVYYCAARARFYYWHTYWGQGTQVTVSS

SEQ ID NO: 37108 - protein, 122 aa, Artificial Sequence
  Chemically Synthesized
QVQLQESGGGLVQAGGSLRLSCAASGNIFVYTDMGWYRQAPGKERELVATISDGTITNYADSVKGRFTISRDNAKNTVYLQMNSLKPEDTAVYYCAVPARVGARHVASHDYWGQGTQVTVSS

SEQ ID NO: 37109 - protein, 122 aa, Artificial Sequence
  Chemically Synthesized
QVQLQESGGGLVQAGGSLRLSCAASGNISPYYYMGWYRQAPGKEREFVAAITRGGSTYYADSVKGRFTISRDNAKNTVYLQMNSLKPEDTAVYYCAVTVVITKDTRGDHYYWGQGTQVTVSS

SEQ ID NO: 37110 - protein, 125 aa, Artificial Sequence
  Chemically Synthesized
QVQLQESGGGLVQAGGSLRLSCAASGYIFRLYAMGWYRQAPGKERELVASMVTVLVPYADSVKGRFTISRDNAKNTVYLQMNSLKPEDTAVYYCAATDYDYTGGDWPFRIYHYYWGQGTQVTVSS

SEQ ID NO: 37111 - protein, 126 aa, Artificial Sequence
  Chemically Synthesized
QVQLQESGGGLVQAGGSLRLSCAASGNIFVIHVMGWYRQAPGKERELVATIGTGSSTYYADSVKGRFTISRDNAKNTVYLQMNSLKPEDTAVYYCAADHRYDGAIVNIWSVIHGYWGQGTQVTVSS

SEQ ID NO: 37112 - protein, 119 aa, Artificial Sequence
  Chemically Synthesized
QVQLQESGGGLVQAGGSLRLSCAASGTIFTTLMGWYRQAPGKEREFVVGFGTSTYYADSVKGRFTISRDNAKNTVYLQMNSLKPEDTAVYYCAVDVKYVSYAADIHSYWGQGTQVTVSS

SEQ ID NO: 37113 - protein, 121 aa, Artificial Sequence
  Chemically Synthesized
QVQLQESGGGLVQAGGSLRLSCAASGTIFSVITMGWYRQAPGKEREFVASISDGTTTNYADSVKGRFTISRDNAKNTVYLQMNSLKPEDTAVYYCAAKADKYSQGHRFIYWGQGTQVTVSS

SEQ ID NO: 37114 - protein, 122 aa, Artificial Sequence
  Chemically Synthesized
QVQLQESGGGLVQAGGSLRLSCAASGNISHAGAMGWYRQAPGKERELVATIASGGNTNYADSVKGRFTISRDNAKNTVYLQMNSLKPEDTAVYYCAVGPPAGYAVQIYFDYWGQGTQVTVSS

SEQ ID NO: 37115 - protein, 118 aa, Artificial Sequence
  Chemically Synthesized
QVQLQESGGGLVQAGGSLRLSCAASGTIFTTYTMGWYRQAPGKERELVAGITPGGTTNYADSVKGRFTISRDNAKNTVYLQMNSLKPEDTAVYYCAVGDWDRGYHGYWGQGTQVTVSS

SEQ ID NO: 37116 - protein, 126 aa, Artificial Sequence
  Chemically Synthesized
QVQLQESGGGLVQAGGSLRLSCAASGTIFYPPGMGWYRQAPGKERELVASITWGSITYYADSVKGRFTISRDNAKNTVYLQMNSLKPEDTAVYYCAASWYGVRTYLSVPSILFGYWGQGTQVTVSS

SEQ ID NO: 37117 - protein, 118 aa, Artificial Sequence
  Chemically Synthesized
QVQLQESGGGLVQAGGSLRLSCAASGYIFPRIRMGWYRQAPGKEREFVASITRGGITNYADSVKGRFTISRDNAKNTVYLQMNSLKPEDTAVYYCAATRRGYYAHDYWGQGTQVTVSS

SEQ ID NO: 37118 - protein, 125 aa, Artificial Sequence
  Chemically Synthesized
QVQLQESGGGLVQAGGSLRLSCAASGSIFYSRMGWYRQAPGKERELVATIAYGTTTNYADSVKGRFTISRDNAKNTVYLQMNSLKPEDTAVYYCAVGRTPIDWTSTYGTYLFGYWGQGTQVTVSS

SEQ ID NO: 37119 - protein, 126 aa, Artificial Sequence
  Chemically Synthesized
QVQLQESGGGLVQAGGSLRLSCAASGTISRPTAMGWYRQAPGKEREFVAAIAFGGSTNYADSVKGRFTISRDNAKNTVYLQMNSLKPEDTAVYYCAADAVLPVYGTDVAYTDLAYWGQGTQVTVSS

SEQ ID NO: 37120 - protein, 122 aa, Artificial Sequence
  Chemically Synthesized
QVQLQESGGGLVQAGGSLRLSCAASGSIFVLYYMGWYRQAPGKEREFVASIDPGTITYYADSVKGRFTISRDNAKNTVYLQMNSLKPEDTAVYYCAATPIDPLIYGVHHDYWGQGTQVTVSS

SEQ ID NO: 37121 - protein, 118 aa, Artificial Sequence
  Chemically Synthesized
QVQLQESGGGLVQAGGSLRLSCAASGTISVAGNMGWYRQAPGKEREFVATIGYGGTTYYADSVKGRFTISRDNAKNTVYLQMNSLKPEDTAVYYCAALQSGSPVHPYWGQGTQVTVSS

SEQ ID NO: 37122 - protein, 115 aa, Artificial Sequence
  Chemically Synthesized
QVQLQESGGGLVQAGGSLRLSCAASGTISRTYAMGWYRQAPGKERELVASIDAGSITNYADSVKGRFTISRDNAKNTVYLQMNSLKPEDTAVYYCAAIRLLVFYWGQGTQVTVSS

SEQ ID NO: 37123 - protein, 117 aa, Artificial Sequence
  Chemically Synthesized
QVQLQESGGGLVQAGGSLRLSCAASGNIFADYYMGWYRQAPGKERELVATINEVLVPYADSVKGRFTISRDNAKNTVYLQMNSLKPEDTAVYYCAARFERDYQHQYWGQGTQVTVSS

SEQ ID NO: 37124 - protein, 112 aa, Artificial Sequence
  Chemically Synthesized
QVQLQESGGGLVQAGGSLRLSCAASGNMGWYRQAPGKERELVAGITYGAITNYADSVKGRFTISRDNAKNTVYLQMNSLKPEDTAVYYCAADVDNVHWYWYWGQGTQVTVSS

SEQ ID NO: 37125 - protein, 117 aa, Artificial Sequence
  Chemically Synthesized
QVQLQESGGGLVQAGGSLRLSCAASGYISTITGMGWYRQAPGKERELVAGIGIGANTYYADSVKGRFTISRDNAKNTVYLQMNSLKPEDTAVYYCAAYRGHYDYHYWGQGTQVTVSS

SEQ ID NO: 37126 - protein, 122 aa, Artificial Sequence
  Chemically Synthesized
QVQLQESGGGLVQAGGSLRLSCAASGTISGDTYMGWYRQAPGKEREFVASIGDGANTNYADSVKGRFTISRDNAKNTVYLQMNSLKPEDTAVYYCAAITVFYYREWDTHPYWGQGTQVTVSS

SEQ ID NO: 37127 - protein, 118 aa, Artificial Sequence
  Chemically Synthesized
QVQLQESGGGLVQAGGSLRLSCAASGNISRGITMGWYRQAPGKERELVATIGPGTTTNYADSVKGRFTISRDNAKNTVYLQMNSLKPEDTAVYYCAVPRDGYTIHYYWGQGTQVTVSS

SEQ ID NO: 37128 - protein, 118 aa, Artificial Sequence
  Chemically Synthesized
QVQLQESGGGLVQAGGSLRLSCAASGYIFDDGSMGWYRQAPGKEREFVATIGDGTSTNYADSVKGRFTISRDNAKNTVYLQMNSLKPEDTAVYYCAVGDALPPYLAYWGQGTQVTVSS

SEQ ID NO: 37129 - protein, 118 aa, Artificial Sequence
  Chemically Synthesized
QVQLQESGGGLVQAGGSLRLSCAASGYISLRYYMGWYRQAPGKERELVAAIAPGSTTNYADSVKGRFTISRDNAKNTVYLQMNSLKPEDTAVYYCAAGHVRAATLGYWGQGTQVTVSS

SEQ ID NO: 37130 - protein, 118 aa, Artificial Sequence
  Chemically Synthesized
QVQLQESGGGLVQAGGSLRLSCAASGYIFRDAYMGWYRQAPGKERELVAGINRGSSTYYADSVKGRFTISRDNAKNTVYLQMNSLKPEDTAVYYCAVWSARYYPYAYWGQGTQVTVSS

SEQ ID NO: 37131 - protein, 110 aa, Artificial Sequence
  Chemically Synthesized
QVQLQESGGGLVQAGGSLRLSCAASGTISDVYDMGWYRQAPGKERELVAAIDTGSNTNYADSVKGRFTISRDNAKNTVYLQMNSLKPEDTAVYYCAVIYWGQGTQVTVSS

SEQ ID NO: 37132 - protein, 122 aa, Artificial Sequence
  Chemically Synthesized
QVQLQESGGGLVQAGGSLRLSCAASGYISRDLPMGWYRQAPGKERELVAAIAAGAITNYADSVKGRFTISRDNAKNTVYLQMNSLKPEDTAVYYCAVYDRLYGYRANQLGYWGQGTQVTVSS

SEQ ID NO: 37133 - protein, 119 aa, Artificial Sequence
  Chemically Synthesized
QVQLQESGGGLVQAGGSLRLSCAASGNIFISYVMGWYRQAPGKERELVAAINDGTNTNYADSVKGRFTISRDNAKNTVYLQMNSLKPEDTAVYYCAAYYDGLPFSVEYWGQGTQVTVSS

SEQ ID NO: 37134 - protein, 118 aa, Artificial Sequence
  Chemically Synthesized
QVQLQESGGGLVQAGGSLRLSCAASGSIFAYYYMGWYRQAPGKEREFVAGITSGGNTYYADSVKGRFTISRDNAKNTVYLQMNSLKPEDTAVYYCAAYGYHNGLLYYWGQGTQVTVSS

SEQ ID NO: 37135 - protein, 116 aa, Artificial Sequence
  Chemically Synthesized
QVQLQESGGGLVQAGGSLRLSCAASGSIFDRDVMGWYRQAPGKERELVATIGAGTNTNYADSVKGRFTISRDNAKNTVYLQMNSLKPEDTAVYYCAVWGDVGYYYWGQGTQVTVSS

SEQ ID NO: 37136 - protein, 120 aa, Artificial Sequence
  Chemically Synthesized
QVQLQESGGGLVQAGGSLRLSCAASGTIFKQGDMGWYRQAPGKERELVATIAAGGITYYADSVKGRFTISRDNAKNTVYLQMNSLKPEDTAVYYCAYYYDDHFWYNHYYWGQGTQVTVSS

SEQ ID NO: 37137 - protein, 122 aa, Artificial Sequence
  Chemically Synthesized
QVQLQESGGGLVQAGGSLRLSCAASGSIFDEFSMGWYRQAPGKEREFVAAIATGSNTNYADSVKGRFTISRDNAKNTVYLQMNSLKPEDTAVYYCAAPFFYARLVFNYHDYWGQGTQVTVSS

SEQ ID NO: 37138 - protein, 117 aa, Artificial Sequence
  Chemically Synthesized
QVQLQESGGGLVQAGGSLRLSCAASGNIFSYVYMGWYRQAPGKERELVAGIGPGATTNYADSVKGRFTISRDNAKNTVYLQMNSLKPEDTAVYYCADYYLGVKHSYWGQGTQVTVSS

SEQ ID NO: 37139 - protein, 122 aa, Artificial Sequence
  Chemically Synthesized
QVQLQESGGGLVQAGGSLRLSCAASGNISWWSYMGWYRQAPGKERELVASISYGGSTNYADSVKGRFTISRDNAKNTVYLQMNSLKPEDTAVYYCAVYTRTYAKSRTWLRYWGQGTQVTVSS

SEQ ID NO: 37140 - protein, 118 aa, Artificial Sequence
  Chemically Synthesized
QVQLQESGGGLVQAGGSLRLSCAASGTISHYYIMGWYRQAPGKEREFVAAIAYGGNTNYADSVKGRFTISRDNAKNTVYLQMNSLKPEDTAVYYCAAVIFWQPYHLYWGQGTQVTVSS

SEQ ID NO: 37141 - protein, 118 aa, Artificial Sequence
  Chemically Synthesized
QVQLQESGGGLVQAGGSLRLSCAASGYIFLVVAMGWYRQAPGKEREFVASIAAGTITNYADSVKGRFTISRDNAKNTVYLQMNSLKPEDTAVYYCAAYRRLGYSHRYWGQGTQVTVSS

SEQ ID NO: 37142 - protein, 118 aa, Artificial Sequence
  Chemically Synthesized
QVQLQESGGGLVQAGGSLRLSCAASGSIFPFYEMGWYRQAPGKEREFVAGIAQGAITYYADSVKGRFTISRDNAKNTVYLQMNSLKPEDTAVYYCAAEAQFRGGLAYWGQGTQVTVSS

SEQ ID NO: 37143 - protein, 116 aa, Artificial Sequence
  Chemically Synthesized
QVQLQESGGGLVQAGGSLRLSCAASGTVYMGWYRQAPGKERELPVLVTVLVPYADSVKGRFTISRDNAKNTVYLQMNSLKPEDTAVYYCAAYYYDPSYDPYYHVYWGQGTQVTVSS

SEQ ID NO: 37144 - protein, 118 aa, Artificial Sequence
  Chemically Synthesized
QVQLQESGGGLVQAGGSLRLSCAASGYIFIHYLMGWYRQAPGKEREFVASIGVGGITNYADSVKGRFTISRDNAKNTVYLQMNSLKPEDTAVYYCAVYDNKGYHHDYWGQGTQVTVSS

SEQ ID NO: 37145 - protein, 122 aa, Artificial Sequence
  Chemically Synthesized
QVQLQESGGGLVQAGGSLRLSCAASGNIFTVVNMGWYRQAPGKERELVAGITPGGNTYYADSVKGRFTISRDNAKNTVYLQMNSLKPEDTAVYYCAVATPYRYLWFSYYRYWGQGTQVTVSS

SEQ ID NO: 37146 - protein, 122 aa, Artificial Sequence
  Chemically Synthesized
QVQLQESGGGLVQAGGSLRLSCAASGTISTTDPMGWYRQAPGKEREFVATISGGGNTYYADSVKGRFTISRDNAKNTVYLQMNSLKPEDTAVYYCAVAPPNDSPYTSFYAYWGQGTQVTVSS

SEQ ID NO: 37147 - protein, 117 aa, Artificial Sequence
  Chemically Synthesized
QVQLQESGGGLVQAGGSLRLSCAASGTIFQLTIMGWYRQAPGKEREFVASIGYGGITNYADSVKGRFTISRDNAKNTVYLQMNSLKPEDTAVYYCAVYYYADDYQYWGQGTQVTVSS

SEQ ID NO: 37148 - protein, 122 aa, Artificial Sequence
  Chemically Synthesized
QVQLQESGGGLVQAGGSLRLSCAASGTISDRDSMGWYRQAPGKERELVASIAPGGNTYYADSVKGRFTISRDNAKNTVYLQMNSLKPEDTAVYYCAVTYGVGRIDVSGLEYWGQGTQVTVSS

SEQ ID NO: 37149 - protein, 118 aa, Artificial Sequence
  Chemically Synthesized
QVQLQESGGGLVQAGGSLRLSCAASGNISYRWDMGWYRQAPGKEREFVASISTRGAITYADSVKGRFTISRDNAKNTVYLQMNSLKPEDTAVYYCAVVGGYPAYLYYWGQGTQVTVSS

SEQ ID NO: 37150 - protein, 118 aa, Artificial Sequence
  Chemically Synthesized
QVQLQESGGGLVQAGGSLRLSCAASGNIFAYTFMGWYRQAPGKERELVATIGTGTTTNYADSVKGRFTISRDNAKNTVYLQMNSLKPEDTAVYYCAVDWFPLTQFRYWGQGTQVTVSS

SEQ ID NO: 37151 - protein, 121 aa, Artificial Sequence
  Chemically Synthesized
QVQLQESGGGLVQAGGSLRLSCAASGSIFSGGAMGWYRQAPGKERELVAAIDYGTSTNYADSVKGRFTISRDNAKNTVYLQMNSLKPEDTAVYYCAVSSLTTLTTTLGLYWGQGTQVTVSS

SEQ ID NO: 37152 - protein, 122 aa, Artificial Sequence
  Chemically Synthesized
QVQLQESGGGLVQAGGSLRLSCAASGTISDGPSMGWYRQAPGKEREFVATIDGGTTTYYADSVKGRFTISRDNAKNTVYLQMNSLKPEDTAVYYCAADYPSTGSRLYLHLYWGQGTQVTVSS

SEQ ID NO: 37153 - protein, 118 aa, Artificial Sequence
  Chemically Synthesized
QVQLQESGGGLVQAGGSLRLSCAASGTISASFAMGWYRQAPGKERELVASIGYGGTTNYADSVKGRFTISRDNAKNTVYLQMNSLKPEDTAVYYCAVYTFAYDVLWYWGQGTQVTVSS

SEQ ID NO: 37154 - protein, 122 aa, Artificial Sequence
  Chemically Synthesized
QVQLQESGGGLVQAGGSLRLSCAASGSISRYDDMGWYRQAPGKERELVASIGQGGNTNYADSVKGRFTISRDNAKNTVYLQMNSLKPEDTAVYYCAAIDYLGDYYGPTHDYWGQGTQVTVSS

SEQ ID NO: 37155 - protein, 118 aa, Artificial Sequence
  Chemically Synthesized
QVQLQESGGGLVQAGGSLRLSCAASGNIFLPKAMGWYRQAPGKEREFVATISLGGNTNYADSVKGRFTISRDNAKNTVYLQMNSLKPEDTAVYYCAAGGYAQDPFLYWGQGTQVTVSS

SEQ ID NO: 37156 - protein, 122 aa, Artificial Sequence
  Chemically Synthesized
QVQLQESGGGLVQAGGSLRLSCAASGYISTATYMGWYRQAPGKEREFVATIGGGAITNYADSVKGRFTISRDNAKNTVYLQMNSLKPEDTAVYYCAAQVDVYSPIYDYLIYWGQGTQVTVSS

SEQ ID NO: 37157 - protein, 123 aa, Artificial Sequence
  Chemically Synthesized
QVQLQESGGGLVQAGGSLRLSCAASGSIFRHSHMGWYRQAPGKERELVASIGDGSSTNYADSVKGRFTISRDNAKNTVYLQMNSLKPEDTAVYYCAVYYGWEYPADFDVHGYWGQGTQVTVSS

SEQ ID NO: 37158 - protein, 118 aa, Artificial Sequence
  Chemically Synthesized
QVQLQESGGGLVQAGGSLRLSCAASGNISRGWDMGWYRQAPGKEREFVAAIGEGTSTNYADSVKGRFTISRDNAKNTVYLQMNSLKPEDTAVYYCAVIYPHDNALYYWGQGTQVTVSS

SEQ ID NO: 37159 - protein, 117 aa, Artificial Sequence
  Chemically Synthesized
QVQLQESGGGLVQAGGSLRLSCAASGNIFPMGWYRQAPGKERELVAAIGYGSTTNYADSVKGRFTISRDNAKNTVYLQMNSLKPEDTAVYYCAAYYTDVGHQNHSYWGQGTQVTVSS

SEQ ID NO: 37160 - protein, 121 aa, Artificial Sequence
  Chemically Synthesized
QVQLQESGGGLVQAGGSLRLSCAASGYISTVYYMGWYRQAPGKERELVASIDLGSTTYYADSVKGRFTISRDNAKNTVYLQMNSLKPEDTAVYYCAVTYLFRRDSALFPYWGQGTQVTVSS

SEQ ID NO: 37161 - protein, 122 aa, Artificial Sequence
  Chemically Synthesized
QVQLQESGGGLVQAGGSLRLSCAASGTISNELYMGWYRQAPGKERELVATIAYGTTTYYADSVKGRFTISRDNAKNTVYLQMNSLKPEDTAVYYCAAAVPYTGQYPYIYTYWGQGTQVTVSS

SEQ ID NO: 37162 - protein, 122 aa, Artificial Sequence
  Chemically Synthesized
QVQLQESGGGLVQAGGSLRLSCAASGTIFIPYDMGWYRQAPGKERELVAGINLGASTYYADSVKGRFTISRDNAKNTVYLQMNSLKPEDTAVYYCAADGGGHYVLYPSHYYWGQGTQVTVSS

SEQ ID NO: 37163 - protein, 118 aa, Artificial Sequence
  Chemically Synthesized
QVQLQESGGGLVQAGGSLRLSCAASGSIFTGGEMGWYRQAPGKERELVAAIDDGGITNYADSVKGRFTISRDNAKNTVYLQMNSLKPEDTAVYYCAAGHYIITKLYYWGQGTQVTVSS

SEQ ID NO: 37164 - protein, 110 aa, Artificial Sequence
  Chemically Synthesized
QVQLQESGGGLVQAGGSLRLSCAASGSIFWRNGMGWYRQAPGKEREFVASINDGATTYYADSVKGRFTISRDNAKNTVYLQMNSLKPEDTAVYYCAALYWGQGTQVTVSS

SEQ ID NO: 37165 - protein, 117 aa, Artificial Sequence
  Chemically Synthesized
QVQLQESGGGLVQAGGSLRLSCAASGNIFAPAAMGWYRQAPGKERELVAGITLGSNYQYADSVKGRFTISRDNAKNTVYLQMNSLKPEDTAVYYCAVPYEWFLFYYWGQGTQVTVSS

SEQ ID NO: 37166 - protein, 118 aa, Artificial Sequence
  Chemically Synthesized
QVQLQESGGGLVQAGGSLRLSCAASGNIFYATVMGWYRQAPGKEREFVAAITEGGTTYYADSVKGRFTISRDNAKNTVYLQMNSLKPEDTAVYYCAVGAYGPIYYVYWGQGTQVTVSS

SEQ ID NO: 37167 - protein, 126 aa, Artificial Sequence
  Chemically Synthesized
QVQLQESGGGLVQAGGSLRLSCAASGNISHRGFMGWYRQAPGKEREFVAGIAVGATTYYADSVKGRFTISRDNAKNTVYLQMNSLKPEDTAVYYCAVVLTNQYYARYFWGSLFGYWGQGTQVTVSS

SEQ ID NO: 37168 - protein, 122 aa, Artificial Sequence
  Chemically Synthesized
QVQLQESGGGLVQAGGSLRLSCAASGNISYTQDMGWYRQAPGKEREFVASIGVGTSTYYADSVKGRFTISRDNAKNTVYLQMNSLKPEDTAVYYCAVESRTIASQYFVHYYWGQGTQVTVSS

SEQ ID NO: 37169 - protein, 121 aa, Artificial Sequence
  Chemically Synthesized
QVQLQESGGGLVQAGGSLRLSCAASGNIFATDRMGWYRQAPGKERELVAGLVTVVLPYADSVKGRFTISRDNAKNTVYLQMNSLKPEDTAVYYCAVIPRGWHYEGQALHYWGQGTQVTVSS

SEQ ID NO: 37170 - protein, 121 aa, Artificial Sequence
  Chemically Synthesized
QVQLQESGGGLVQAGGSLRLSCAASGNIFPDYAMGWYRQAPGKERELVATIDHGGNTNYADSVKGRFTISRDNAKNTVYLQMNSLKPEDTAVYYCAAGPIYGLYWVQHYYWGQGTQVTVSS

SEQ ID NO: 37171 - protein, 117 aa, Artificial Sequence
  Chemically Synthesized
QVQLQESGGGLVQAGGSLRLSCAASGYISYGAMGWYRQAPGKEREFVATIAVGATTNYADSVKGRFTISRDNAKNTVYLQMNSLKPEDTAVYYCAVTDPDQDYHDYWGQGTQVTVSS

SEQ ID NO: 37172 - protein, 118 aa, Artificial Sequence
  Chemically Synthesized
QVQLQESGGGLVQAGGSLRLSCAASGNIFDSNYMGWYRQAPGKEREFVASISPGGTTNYADSVKGRFTISRDNAKNTVYLQMNSLKPEDTAVYYCAVPDEYVWTHDYWGQGTQVTVSS

SEQ ID NO: 37173 - protein, 118 aa, Artificial Sequence
  Chemically Synthesized
QVQLQESGGGLVQAGGSLRLSCAASGSIFILSAMGWYRQAPGKEREFVAGIADGTTTYYADSVKGRFTISRDNAKNTVYLQMNSLKPEDTAVYYCAVSPSAVPGYTYWGQGTQVTVSS

SEQ ID NO: 37174 - protein, 126 aa, Artificial Sequence
  Chemically Synthesized
QVQLQESGGGLVQAGGSLRLSCAASGSIFAFNYMGWYRQAPGKEREFVAAIASGGTTNYADSVKGRFTISRDNAKNTVYLQMNSLKPEDTAVYYCAVPRYQPQYLYYYYLRPYGYWGQGTQVTVSS

SEQ ID NO: 37175 - protein, 121 aa, Artificial Sequence
  Chemically Synthesized
QVQLQESGGGLVQAGGSLRLSCAASGNIFSPLLMGWYRQAPGKEREFVAAIIVVLVPYADSVKGRFTISRDNAKNTVYLQMNSLKPEDTAVYYCAAYDGLRYWKDSLHGYWGQGTQVTVSS

SEQ ID NO: 37176 - protein, 118 aa, Artificial Sequence
  Chemically Synthesized
QVQLQESGGGLVQAGGSLRLSCAASGNIFTYSAMGWYRQAPGKEREFVAGINYGATTYYADSVKGRFTISRDNAKNTVYLQMNSLKPEDTAVYYCAATHAYILSHPYWGQGTQVTVSS

SEQ ID NO: 37177 - protein, 123 aa, Artificial Sequence
  Chemically Synthesized
QVQLQESGGGLVQAGGSLRLSCAASGNISGRDPMGWYRQAPGKEREFVASINIGGTNTYYADSVKGRFTISRDNAKNTVYLQMNSLKPEDTAVYYCAALTRRSTYANDPHLYWGQGTQVTVSS

SEQ ID NO: 37178 - protein, 118 aa, Artificial Sequence
  Chemically Synthesized
QVQLQESGGGLVQAGGSLRLSCAASGTISALSYMGWYRQAPGKEREFVAAITYGGTTNYADSVKGRFTISRDNAKNTVYLQMNSLKPEDTAVYYCAVNHSFVPYYRYWGQGTQVTVSS

SEQ ID NO: 37179 - protein, 126 aa, Artificial Sequence
  Chemically Synthesized
QVQLQESGGGLVQAGGSLRLSCAASGNIFAGQVMGWYRQAPGKERELVAAIDDGATTNYADSVKGRFTISRDNAKNTVYLQMNSLKPEDTAVYYCAVVVDVYDDIYYDTDYTHAYWGQGTQVTVSS

SEQ ID NO: 37180 - protein, 118 aa, Artificial Sequence
  Chemically Synthesized
QVQLQESGGGLVQAGGSLRLSCAASGNIFAAYYMGWYRQAPGKEREFVAAIALGATTYYADSVKGRFTISRDNAKNTVYLQMNSLKPEDTAVYYCAVTKYVLYHHRYWGQGTQVTVSS

SEQ ID NO: 37181 - protein, 122 aa, Artificial Sequence
  Chemically Synthesized
QVQLQESGGGLVQAGGSLRLSCAASGNIFTQSVMGWYRQAPGKEREFVASINRGATTYYADSVKGRFTISRDNAKNTVYLQMNSLKPEDTAVYYCAADTTWGGYRPHGYLYWGQGTQVTVSS

SEQ ID NO: 37182 - protein, 121 aa, Artificial Sequence
  Chemically Synthesized
QVQLQESGGGLVQAGGSLRLSCAASGIFLSVLMGWYRQAPGKEREFVASIGYGANTNYADSVKGRFTISRDNAKNTVYLQMNSLKPEDTAVYYCAVADGSSVSYADGYDYWGQGTQVTVSS

SEQ ID NO: 37183 - protein, 117 aa, Artificial Sequence
  Chemically Synthesized
QVQLQESGGGLVQAGGSLRLSCAASGSISSWRSMGWYRQAPGKEREFVAGLVTVVLPYADSVKGRFTISRDNAKNTVYLQMNSLKPEDTAVYYCAVGYTRYAHLLYWGQGTQVTVSS

SEQ ID NO: 37184 - protein, 118 aa, Artificial Sequence
  Chemically Synthesized
QVQLQESGGGLVQAGGSLRLSCAASGNIFTGAVMGWYRQAPGKERELVAAIAYGTSTNYADSVKGRFTISRDNAKNTVYLQMNSLKPEDTAVYYCAVDYFGDYQLEYWGQGTQVTVSS

SEQ ID NO: 37185 - protein, 120 aa, Artificial Sequence
  Chemically Synthesized
QVQLQESGGGLVQAGGSLRLSCAASGTISLLAFMGWYRQAPGKEREFVAAIGQGGSTYADSVKGRFTISRDNAKNTVYLQMNSLKPEDTAVYYCAVEFDVPVFYSLTIYWGQGTQVTVSS

SEQ ID NO: 37186 - protein, 118 aa, Artificial Sequence
  Chemically Synthesized
QVQLQESGGGLVQAGGSLRLSCAASGSIFSYNSMGWYRQAPGKEREFVASINYGTTTYYADSVKGRFTISRDNAKNTVYLQMNSLKPEDTAVYYCAAHVYFGQGHVYWGQGTQVTVSS

SEQ ID NO: 37187 - protein, 118 aa, Artificial Sequence
  Chemically Synthesized
QVQLQESGGGLVQAGGSLRLSCAASGNISQDYFMGWYRQAPGKEREFVAGIGDGTSTYYADSVKGRFTISRDNAKNTVYLQMNSLKPEDTAVYYCAVNPPQWRYYLYWGQGTQVTVSS

SEQ ID NO: 37188 - protein, 126 aa, Artificial Sequence
  Chemically Synthesized
QVQLQESGGGLVQAGGSLRLSCAASGYISRYWIMGWYRQAPGKEREFVAAISWGSTTNYADSVKGRFTISRDNAKNTVYLQMNSLKPEDTAVYYCAAFYIITRTSSSTREYRFRYWGQGTQVTVSS

SEQ ID NO: 37189 - protein, 114 aa, Artificial Sequence
  Chemically Synthesized
QVQLQESGGGLVQAGGSLRLSCAASGNISSGDTMGWYRQAPGKERELVASIADGATTYYADSVKGRFTISRDNAKNTVYLQMNSLKPEDTAVYYCAVTHPHLYWGQGTQVTVSS

SEQ ID NO: 37190 - protein, 117 aa, Artificial Sequence
  Chemically Synthesized
QVQLQESGGGLVQAGGSLRLSCAASGTIFGVSMGWYRQAPGKEREFVAGIDNGGITNYADSVKGRFTISRDNAKNTVYLQMNSLKPEDTAVYYCAATGPSDTPYSYWGQGTQVTVSS

SEQ ID NO: 37191 - protein, 110 aa, Artificial Sequence
  Chemically Synthesized
QVQLQESGGGLVQAGGSLRLSCAASGNIFHVIGMGWYRQAPGKERELVASITIGSITNYADSVKGRFTISRDNAKNTVYLQMNSLKPEDTAVYYCAVMYWGQGTQVTVSS

SEQ ID NO: 37192 - protein, 117 aa, Artificial Sequence
  Chemically Synthesized
QVQLQESGGGLVQAGGSLRLSCAASGYIFAETVMGWYRQAPGKEREFVATINVGTTTYYADSVKGRFTISRDNAKNTVYLQMNSLKPEDTAVYYCAAYDLNVRYFYWGQGTQVTVSS

SEQ ID NO: 37193 - protein, 122 aa, Artificial Sequence
  Chemically Synthesized
QVQLQESGGGLVQAGGSLRLSCAASGNIFYAPSMGWYRQAPGKEREFVASISLGASTNYADSVKGRFTISRDNAKNTVYLQMNSLKPEDTAVYYCAVGDGTGSSSYIDLSYWGQGTQVTVSS

SEQ ID NO: 37194 - protein, 117 aa, Artificial Sequence
  Chemically Synthesized
QVQLQESGGGLVQAGGSLRLSCAASGTIFGYLMGWYRQAPGKERELVAGITWGSSTNYADSVKGRFTISRDNAKNTVYLQMNSLKPEDTAVYYCAVFLIRDRDYQYWGQGTQVTVSS

SEQ ID NO: 37195 - protein, 117 aa, Artificial Sequence
  Chemically Synthesized
QVQLQESGGGLVQAGGSLRLSCAASGTIFYSAYMGWYRQAPGKEREFVAAINSGGNTYYADSVKGRFTISRDNAKNTVYLQMNSLKPEDTAVYYCAVYYPSRSFYYWGQGTQVTVSS

SEQ ID NO: 37196 - protein, 118 aa, Artificial Sequence
  Chemically Synthesized
QVQLQESGGGLVQAGGSLRLSCAASGNIFVYDVMGWYRQAPGKERELVAGITDGGTTNYADSVKGRFTISRDNAKNTVYLQMNSLKPEDTAVYYCAVDSEWPFYQDYWGQGTQVTVSS

SEQ ID NO: 37197 - protein, 118 aa, Artificial Sequence
  Chemically Synthesized
QVQLQESGGGLVQAGGSLRLSCAASGYISDLLPMGWYRQAPGKERELVASITVGGTTNYADSVKGRFTISRDNAKNTVYLQMNSLKPEDTAVYYCAADDGDGNTYYYWGQGTQVTVSS

SEQ ID NO: 37198 - protein, 122 aa, Artificial Sequence
  Chemically Synthesized
QVQLQESGGGLVQAGGSLRLSCAASGTISSWWWMGWYRQAPGKEREFVATISSGGSTNYADSVKGRFTISRDNAKNTVYLQMNSLKPEDTAVYYCAVAGDGRHAIQLGLAYWGQGTQVTVSS

SEQ ID NO: 37199 - protein, 125 aa, Artificial Sequence
  Chemically Synthesized
QVQLQESGGGLVQAGGSLRLSCAASGNISNYAYMGWYRQAPGKERELVAAISRGGNTYYADSVKGRFTISRDNAKNTVYLQMNSLKPEDTAVYYCAAKFPYSVYQYRIRYLHGYWGQGTQVTVSS

SEQ ID NO: 37200 - protein, 123 aa, Artificial Sequence
  Chemically Synthesized
QVQLQESGGGLVQAGGSLRLSCAASGNISSVVMGWYRQAPGKERELVATITYGATTNYADSVKGRFTISRDNAKNTVYLQMNSLKPEDTAVYYCAAGYWYQYFPPAYDDHGYWGQGTQVTVSS

SEQ ID NO: 37201 - protein, 118 aa, Artificial Sequence
  Chemically Synthesized
QVQLQESGGGLVQAGGSLRLSCAASGNISDPSNMGWYRQAPGKERELVAAIGAGTNTNYADSVKGRFTISRDNAKNTVYLQMNSLKPEDTAVYYCAAYYQDVPAHNYWGQGTQVTVSS

SEQ ID NO: 37202 - protein, 118 aa, Artificial Sequence
  Chemically Synthesized
QVQLQESGGGLVQAGGSLRLSCAASGYISYYLYMGWYRQAPGKERELVAGISHGASTNYADSVKGRFTISRDNAKNTVYLQMNSLKPEDTAVYYCAVWYSSTLTFGYWGQGTQVTVSS

SEQ ID NO: 37203 - protein, 126 aa, Artificial Sequence
  Chemically Synthesized
QVQLQESGGGLVQAGGSLRLSCAASGNIFDYSYMGWYRQAPGKERELVAAITVGAITYYADSVKGRFTISRDNAKNTVYLQMNSLKPEDTAVYYCAVDRIRWDTDNTPPWWNHTYWGQGTQVTVSS

SEQ ID NO: 37204 - protein, 126 aa, Artificial Sequence
  Chemically Synthesized
QVQLQESGGGLVQAGGSLRLSCAASGNIFSSRDMGWYRQAPGKERELVPLLVTVLLPYADSVKGRFTISRDNAKNTVYLQMNSLKPEDTAVYYCAALRTGAVAYYDYGTQRVFGYWGQGTQVTVSS

SEQ ID NO: 37205 - protein, 114 aa, Artificial Sequence
  Chemically Synthesized
QVQLQESGGGLVQAGGSLRLSCAASGTIFTYQYMGWYRQAPGKEREFVASIGYGSTTNYADSVKGRFTISRDNAKNTVYLQMNSLKPEDTAVYYCAVEGLFPYWGQGTQVTVSS

SEQ ID NO: 37206 - protein, 118 aa, Artificial Sequence
  Chemically Synthesized
QVQLQESGGGLVQAGGSLRLSCAASGTIFYYRTMGWYRQAPGKEREFVATISYGGTTNYADSVKGRFTISRDNAKNTVYLQMNSLKPEDTAVYYCAVRGIATLTLRYWGQGTQVTVSS

SEQ ID NO: 37207 - protein, 117 aa, Artificial Sequence
  Chemically Synthesized
QVQLQESGGGLVQAGGSLRLSCAASGTIFAPVGMGWYRQAPGKERELVAILVTVLLPYADSVKGRFTISRDNAKNTVYLQMNSLKPEDTAVYYCAVHLASDRNHPYWGQGTQVTVSS

SEQ ID NO: 37208 - protein, 121 aa, Artificial Sequence
  Chemically Synthesized
QVQLQESGGGLVQAGGSLRLSCAASGTIFEHEGMGWYRQAPGKERELVADIDGGGSTNYADSVKGRFTISRDNAKNTVYLQMNSLKPEDTAVYYCAVYSGGPYRYYHSYYWGQGTQVTVSS

SEQ ID NO: 37209 - protein, 122 aa, Artificial Sequence
  Chemically Synthesized
QVQLQESGGGLVQAGGSLRLSCAASGNISFYSFMGWYRQAPGKERELVATIAYGSTTYYADSVKGRFTISRDNAKNTVYLQMNSLKPEDTAVYYCAVGDANSDPPYRGFRYWGQGTQVTVSS

SEQ ID NO: 37210 - protein, 117 aa, Artificial Sequence
  Chemically Synthesized
QVQLQESGGGLVQAGGSLRLSCAASGSISSFTMGWYRQAPGKEREFVASIDIGSSTNYADSVKGRFTISRDNAKNTVYLQMNSLKPEDTAVYYCAAVKGDDWGHEYWGQGTQVTVSS

SEQ ID NO: 37211 - protein, 116 aa, Artificial Sequence
  Chemically Synthesized
QVQLQESGGGLVQAGGSLRLSCAASGYIFYGLYMGWYRQAPGKERELVAAITSGGNTNYADSVKGRFTISRDNAKNTVYLQMNSLKPEDTAVYYCAVAFPFSTIYWGQGTQVTVSS

SEQ ID NO: 37212 - protein, 117 aa, Artificial Sequence
  Chemically Synthesized
QVQLQESGGGLVQAGGSLRLSCAASGTIFDSYGMGWYRQAPGKEREFVAAIGYGTITNYADSVKGRFTISRDNAKNTVYLQMNSLKPEDTAVYYCAAYSYDYQGYYWGQGTQVTVSS

SEQ ID NO: 37213 - protein, 118 aa, Artificial Sequence
  Chemically Synthesized
QVQLQESGGGLVQAGGSLRLSCAASGTISGGDYMGWYRQAPGKERELVAGIAYGSITNYADSVKGRFTISRDNAKNTVYLQMNSLKPEDTAVYYCAVTYRIGFVYYYWGQGTQVTVSS

SEQ ID NO: 37214 - protein, 116 aa, Artificial Sequence
  Chemically Synthesized
QVQLQESGGGLVQAGGSLRLSCAASGTIFQSWIMGWYRQAPGKERELVATIAAGGITNYADSVKGRFTISRDNAKNTVYLQMNSLKPEDTAVYYCAVYRTAGWWYWGQGTQVTVSS

SEQ ID NO: 37215 - protein, 126 aa, Artificial Sequence
  Chemically Synthesized
QVQLQESGGGLVQAGGSLRLSCAASGTIFPYWIMGWYRQAPGKERELVAGIGSGSNTNYADSVKGRFTISRDNAKNTVYLQMNSLKPEDTAVYYCAARYNEDRYNDPSPWWVYPYWGQGTQVTVSS

SEQ ID NO: 37216 - protein, 118 aa, Artificial Sequence
  Chemically Synthesized
QVQLQESGGGLVQAGGSLRLSCAASGNISRYAIMGWYRQAPGKERELVATINPGGITYYADSVKGRFTISRDNAKNTVYLQMNSLKPEDTAVYYCAVTVYTSYGHDYWGQGTQVTVSS

SEQ ID NO: 37217 - protein, 122 aa, Artificial Sequence
  Chemically Synthesized
QVQLQESGGGLVQAGGSLRLSCAASGTISVYATMGWYRQAPGKERELVATIDHGGTTYYADSVKGRFTISRDNAKNTVYLQMNSLKPEDTAVYYCAVRVALDDGVRIFLAYWGQGTQVTVSS

SEQ ID NO: 37218 - protein, 119 aa, Artificial Sequence
  Chemically Synthesized
QVQLQESGGGLVQAGGSLRLSCAASGSIFVGGTMGWYRQAPGKEREFVATINFGSNTNYADSVKGRFTISRDNAKNTVYLQMNSLKPEDTAVYYCAAAYRYSDQRHGYWGQGTQVTVSS

SEQ ID NO: 37219 - protein, 118 aa, Artificial Sequence
  Chemically Synthesized
QVQLQESGGGLVQAGGSLRLSCAASGNISIGDAMGWYRQAPGKERELVAGINFGGTTYYADSVKGRFTISRDNAKNTVYLQMNSLKPEDTAVYYCAVGNDAQYGFRYWGQGTQVTVSS

SEQ ID NO: 37220 - protein, 122 aa, Artificial Sequence
  Chemically Synthesized
QVQLQESGGGLVQAGGSLRLSCAASGNIFSPRGMGWYRQAPGKEREFVATIGRGATTNYADSVKGRFTISRDNAKNTVYLQMNSLKPEDTAVYYCAVGYYNYFAYSLFYPYWGQGTQVTVSS

SEQ ID NO: 37221 - protein, 121 aa, Artificial Sequence
  Chemically Synthesized
QVQLQESGGGLVQAGGSLRLSCAASGNISRGGPMGWYRQAPGKERELVATIDTGTITYYADSVKGRFTISRDNAKNTVYLQMNSLKPEDTAVYYCAAWSKYPASLTTVLYWGQGTQVTVSS

SEQ ID NO: 37222 - protein, 123 aa, Artificial Sequence
  Chemically Synthesized
QVQLQESGGGLVQAGGSLRLSCAASGNIFTYDDMGWYRQAPGKERELVASIGSGSSTYYADSVKGRFTISRDNAKNTVYLQMNSLKPEDTAVYYCAVARPSSDGFALYRLYYWGQGTQVTVSS

SEQ ID NO: 37223 - protein, 118 aa, Artificial Sequence
  Chemically Synthesized
QVQLQESGGGLVQAGGSLRLSCAASGYIFTVTMGWYRQAPGKERELVATITIGTSTNYADSVKGRFTISRDNAKNTVYLQMNSLKPEDTAVYYCAVRYLYPTCYSLYWGQGTQVTVSS

SEQ ID NO: 37224 - protein, 126 aa, Artificial Sequence
  Chemically Synthesized
QVQLQESGGGLVQAGGSLRLSCAASGYIFRTGVMGWYRQAPGKERELVAAIDHGTSTNYADSVKGRFTISRDNAKNTVYLQMNSLKPEDTAVYYCAVYARDYGWFWVWEWSYHRYWGQGTQVTVSS

SEQ ID NO: 37225 - protein, 116 aa, Artificial Sequence
  Chemically Synthesized
QVQLQESGGGLVQAGGSLRLSCAASGTILLVVMGWYRQAPGKERELVATIVVVLIPYADSVKGRFTISRDNAKNTVYLQMNSLKPEDTAVYYCAAGSYSVNVLDYWGQGTQVTVSS

SEQ ID NO: 37226 - protein, 126 aa, Artificial Sequence
  Chemically Synthesized
QVQLQESGGGLVQAGGSLRLSCAASGYISYHTWMGWYRQAPGKERELVAGISYGGSTYYADSVKGRFTISRDNAKNTVYLQMNSLKPEDTAVYYCAVEYFRDIFTWYTYYLYYAYWGQGTQVTVSS

SEQ ID NO: 37227 - protein, 118 aa, Artificial Sequence
  Chemically Synthesized
QVQLQESGGGLVQAGGSLRLSCAASGYISPDLWMGWYRQAPGKERELVASIDPGGSTYYADSVKGRFTISRDNAKNTVYLQMNSLKPEDTAVYYCAAYIKWVRGYDYWGQGTQVTVSS

SEQ ID NO: 37228 - protein, 118 aa, Artificial Sequence
  Chemically Synthesized
QVQLQESGGGLVQAGGSLRLSCAASGTISYGNYMGWYRQAPGKERELVAAISSGSTTNYADSVKGRFTISRDNAKNTVYLQMNSLKPEDTAVYYCAVVGDNKWPLYYWGQGTQVTVSS

SEQ ID NO: 37229 - protein, 122 aa, Artificial Sequence
  Chemically Synthesized
QVQLQESGGGLVQAGGSLRLSCAASGSISYRYRMGWYRQAPGKERELVASINGGSITYYADSVKGRFTISRDNAKNTVYLQMNSLKPEDTAVYYCAVRPYPYAYTWKWHYYWGQGTQVTVSS

SEQ ID NO: 37230 - protein, 122 aa, Artificial Sequence
  Chemically Synthesized
QVQLQESGGGLVQAGGSLRLSCAASGSISYAWDMGWYRQAPGKERELVASIGTGANTYYADSVKGRFTISRDNAKNTVYLQMNSLKPEDTAVYYCAADNDYYEYQYRDHPYWGQGTQVTVSS

SEQ ID NO: 37231 - protein, 123 aa, Artificial Sequence
  Chemically Synthesized
QVQLQESGGGLVQAGGSLRLSCAASGTISKPYTMGWYRQAPGKERELVATITDGTNTYYADSVKGRFTISRDNAKNTVYLQMNSLKPEDTAVYYCAVRPPDRYLFTDSKLGYWGQGTQVTVSS

SEQ ID NO: 37232 - protein, 121 aa, Artificial Sequence
  Chemically Synthesized
QVQLQESGGGLVQAGGSLRLSCAASGTISDRAAMGWYRQAPGKEREFVAGISYGTNTNYADSVKGRFTISRDNAKNTVYLQMNSLKPEDTAVYYCAVWANSDDGDDQSFYWGQGTQVTVSS

SEQ ID NO: 37233 - protein, 111 aa, Artificial Sequence
  Chemically Synthesized
QVQLQESGGGLVQAGGSLRLSCAASGTISPVAQMGWYRQAPGKEREFVATIDDGSTTYYADSVKGRFTISRDNAKNTVYLQMNSLKPEDTAVYYCAVVYYWGQGTQVTVSS

SEQ ID NO: 37234 - protein, 118 aa, Artificial Sequence
  Chemically Synthesized
QVQLQESGGGLVQAGGSLRLSCAASGSISDYIDMGWYRQAPGKEREFVASITYGASTNYADSVKGRFTISRDNAKNTVYLQMNSLKPEDTAVYYCAVEIILSQYHDYWGQGTQVTVSS

SEQ ID NO: 37235 - protein, 118 aa, Artificial Sequence
  Chemically Synthesized
QVQLQESGGGLVQAGGSLRLSCAASGNISRLWSMGWYRQAPGKERELVAAIDYGGNTNYADSVKGRFTISRDNAKNTVYLQMNSLKPEDTAVYYCAVRDATGYPFYYWGQGTQVTVSS

SEQ ID NO: 37236 - protein, 122 aa, Artificial Sequence
  Chemically Synthesized
QVQLQESGGGLVQAGGSLRLSCAASGSISDVYTMGWYRQAPGKEREFVAGIDLGSITNYADSVKGRFTISRDNAKNTVYLQMNSLKPEDTAVYYCAANTEPGQLDKETYWYWGQGTQVTVSS

SEQ ID NO: 37237 - protein, 118 aa, Artificial Sequence
  Chemically Synthesized
QVQLQESGGGLVQAGGSLRLSCAASGNIFYYRSMGWYRQAPGKEREFVAAISYGGNTYYADSVKGRFTISRDNAKNTVYLQMNSLKPEDTAVYYCAAYAGYALHFDYWGQGTQVTVSS

SEQ ID NO: 37238 - protein, 118 aa, Artificial Sequence
  Chemically Synthesized
QVQLQESGGGLVQAGGSLRLSCAASGNIFVDGNMGWYRQAPGKEREFVASIALGTSTNYADSVKGRFTISRDNAKNTVYLQMNSLKPEDTAVYYCAVGNDTDFSHYYWGQGTQVTVSS

SEQ ID NO: 37239 - protein, 118 aa, Artificial Sequence
  Chemically Synthesized
QVQLQESGGGLVQAGGSLRLSCAASGYISIHNHMGWYRQAPGKEREFVASITDGSNTNYADSVKGRFTISRDNAKNTVYLQMNSLKPEDTAVYYCAVNLDGYDYLGYWGQGTQVTVSS

SEQ ID NO: 37240 - protein, 118 aa, Artificial Sequence
  Chemically Synthesized
QVQLQESGGGLVQAGGSLRLSCAASGYISVYDYMGWYRQAPGKEREFVAGIADGGITNYADSVKGRFTISRDNAKNTVYLQMNSLKPEDTAVYYCAAVWHHRKDHPYWGQGTQVTVSS

SEQ ID NO: 37241 - protein, 118 aa, Artificial Sequence
  Chemically Synthesized
QVQLQESGGGLVQAGGSLRLSCAASGTISGLAVMGWYRQAPGKERELVAGIDDGAITNYADSVKGRFTISRDNAKNTVYLQMNSLKPEDTAVYYCAVPYPYPSVFAYWGQGTQVTVSS

SEQ ID NO: 37242 - protein, 118 aa, Artificial Sequence
  Chemically Synthesized
QVQLQESGGGLVQAGGSLRLSCAASGNIFTVQFMGWYRQAPGKERELVATITSGSSTYYADSVKGRFTISRDNAKNTVYLQMNSLKPEDTAVYYCAAYQRWFNYFPYWGQGTQVTVSS

SEQ ID NO: 37243 - protein, 112 aa, Artificial Sequence
  Chemically Synthesized
QVQLQESGGGLVQAGGSLRLSCAASGTIFPYDPMGWYRQAPGKERELVASITYGGTTYYADSVKGRFTISRDNAKNTVYLQMNSLKPEDTAVYYCAVGNIYWGQGTQVTVSS

SEQ ID NO: 37244 - protein, 118 aa, Artificial Sequence
  Chemically Synthesized
QVQLQESGGGLVQAGGSLRLSCAASGSISDYSYMGWYRQAPGKEREFVAAIAPGSSTNYADSVKGRFTISRDNAKNTVYLQMNSLKPEDTAVYYCAADASRTSYHHYWGQGTQVTVSS

SEQ ID NO: 37245 - protein, 118 aa, Artificial Sequence
  Chemically Synthesized
QVQLQESGGGLVQAGGSLRLSCAASGTIFPDRVMGWYRQAPGKERELVATISIGGTTYYADSVKGRFTISRDNAKNTVYLQMNSLKPEDTAVYYCAASTYEFFTHSYWGQGTQVTVSS

SEQ ID NO: 37246 - protein, 122 aa, Artificial Sequence
  Chemically Synthesized
QVQLQESGGGLVQAGGSLRLSCAASGYISYTNFMGWYRQAPGKERELVASISIGSTTNYADSVKGRFTISRDNAKNTVYLQMNSLKPEDTAVYYCAAYGEPLVDGKPNHKYWGQGTQVTVSS

SEQ ID NO: 37247 - protein, 116 aa, Artificial Sequence
  Chemically Synthesized
QVQLQESGGGLVQAGGSLRLSCAASGSISGSRRMGWYRQAPGKEREFVASITWGATTNYADSVKGRFTISRDNAKNTVYLQMNSLKPEDTAVYYCAALLRYYYFYWGQGTQVTVSS

SEQ ID NO: 37248 - protein, 118 aa, Artificial Sequence
  Chemically Synthesized
QVQLQESGGGLVQAGGSLRLSCAASGTISRLATMGWYRQAPGKEREFVAAITYGGSTYYADSVKGRFTISRDNAKNTVYLQMNSLKPEDTAVYYCAVWETRWRRHAYWGQGTQVTVSS

SEQ ID NO: 37249 - protein, 122 aa, Artificial Sequence
  Chemically Synthesized
QVQLQESGGGLVQAGGSLRLSCAASGSIFRYTPMGWYRQAPGKERELVAGISGGATTYYADSVKGRFTISRDNAKNTVYLQMNSLKPEDTAVYYCAAVGAGLWRYGSPHLYWGQGTQVTVSS

SEQ ID NO: 37250 - protein, 116 aa, Artificial Sequence
  Chemically Synthesized
QVQLQESGGGLVQAGGSLRLSCAASGYIFRHVYMGWYRQAPGKEREFVATIGVGTNTNYADSVKGRFTISRDNAKNTVYLQMNSLKPEDTAVYYCALYYWFLHHYWGQGTQVTVSS

SEQ ID NO: 37251 - protein, 121 aa, Artificial Sequence
  Chemically Synthesized
QVQLQESGGGLVQAGGSLRLSCAASGSIFYYDYMGWYRQAPGKERELVASITEGSNTYYADSVKGRFTISRDNAKNTVYLQMNSLKPEDTAVYYCAVTDVSSTTLTTVIYWGQGTQVTVSS

SEQ ID NO: 37252 - protein, 121 aa, Artificial Sequence
  Chemically Synthesized
QVQLQESGGGLVQAGGSLRLSCAASGNISGDRYMGWYRQAPGKEREFVASIGYGASPYADSVKGRFTISRDNAKNTVYLQMNSLKPEDTAVYYCAVYIDGYGRVVGYHSYWGQGTQVTVSS

SEQ ID NO: 37253 - protein, 116 aa, Artificial Sequence
  Chemically Synthesized
QVQLQESGGGLVQAGGSLRLSCAASGTIFAYWAMGWYRQAPGKEREFVATITPGTSTYYADSVKGRFTISRDNAKNTVYLQMNSLKPEDTAVYYCAAKDDRAGSYWGQGTQVTVSS

SEQ ID NO: 37254 - protein, 121 aa, Artificial Sequence
  Chemically Synthesized
QVQLQESGGGLVQAGGSLRLSCAASGTIFDGYVMGWYRQAPGKEREFVATIAQGSTTNYADSVKGRFTISRDNAKNTVYLQMNSLKPEDTAVYYCAVYTGYLTPSRPSIYWGQGTQVTVSS

SEQ ID NO: 37255 - protein, 118 aa, Artificial Sequence
  Chemically Synthesized
QVQLQESGGGLVQAGGSLRLSCAASGTIFTQRQMGWYRQAPGKEREFVAGISAGAITNYADSVKGRFTISRDNAKNTVYLQMNSLKPEDTAVYYCAAYDGDDLWLDYWGQGTQVTVSS

SEQ ID NO: 37256 - protein, 118 aa, Artificial Sequence
  Chemically Synthesized
QVQLQESGGGLVQAGGSLRLSCAASGNISDDDMGWYRQAPGKEREFVATIDGIGANTNYADSVKGRFTISRDNAKNTVYLQMNSLKPEDTAVYYCAARNRWDDWHKYWGQGTQVTVSS

SEQ ID NO: 37257 - protein, 117 aa, Artificial Sequence
  Chemically Synthesized
QVQLQESGGGLVQAGGSLRLSCAASGTISSYDDMGWYRQAPGKERELVASINDGGTTNYADSVKGRFTISRDNAKNTVYLQMNSLKPEDTAVYYCAVYTSLVLTLYWGQGTQVTVSS

SEQ ID NO: 37258 - protein, 116 aa, Artificial Sequence
  Chemically Synthesized
QVQLQESGGGLVQAGGSLRLSCAASGNISRRDYMGWYRQAPGKEREFVATIGYGGITYYADSVKGRFTISRDNAKNTVYLQMNSLKPEDTAVYYCAVYLRYYHYYWGQGTQVTVSS

SEQ ID NO: 37259 - protein, 116 aa, Artificial Sequence
  Chemically Synthesized
QVQLQESGGGLVQAGGSLRLSCAASGSISSIRHMGWYRQAPGKERELVAAIGRGGITYYADSVKGRFTISRDNAKNTVYLQMNSLKPEDTAVYYCAVHFRRSLYYWGQGTQVTVSS

SEQ ID NO: 37260 - protein, 123 aa, Artificial Sequence
  Chemically Synthesized
QVQLQESGGGLVQAGGSLRLSCAASGTIFEGYYMGWYRQAPGKERELVAVLLTVLIPYADSVKGRFTISRDNAKNTVYLQMNSLKPEDTAVYYCAVTWYVPPRYPTYPAGGYWGQGTQVTVSS

SEQ ID NO: 37261 - protein, 126 aa, Artificial Sequence
  Chemically Synthesized
QVQLQESGGGLVQAGGSLRLSCAASGTIFGERHMGWYRQAPGKEREFVAAIASGGSTYYADSVKGRFTISRDNAKNTVYLQMNSLKPEDTAVYYCAVSSYDDDDVRTLRWYYLSYWGQGTQVTVSS

SEQ ID NO: 37262 - protein, 118 aa, Artificial Sequence
  Chemically Synthesized
QVQLQESGGGLVQAGGSLRLSCAASGTISSYTVMGWYRQAPGKERELVAAIALGSSTYYADSVKGRFTISRDNAKNTVYLQMNSLKPEDTAVYYCAVFDSSFWFFPYWGQGTQVTVSS

SEQ ID NO: 37263 - protein, 122 aa, Artificial Sequence
  Chemically Synthesized
QVQLQESGGGLVQAGGSLRLSCAASGSIFADGYMGWYRQAPGKERELVATIGDGAITNYADSVKGRFTISRDNAKNTVYLQMNSLKPEDTAVYYCAAGSYFKIGAKHTLGYWGQGTQVTVSS

SEQ ID NO: 37264 - protein, 118 aa, Artificial Sequence
  Chemically Synthesized
QVQLQESGGGLVQAGGSLRLSCAASGTIFTFCLMGWYRQAPGKERELVAAISEGTITNYADSVKGRFTISRDNAKNTVYLQMNSLKPEDTAVYYCAVLYPYILGYGYWGQGTQVTVSS

SEQ ID NO: 37265 - protein, 118 aa, Artificial Sequence
  Chemically Synthesized
QVQLQESGGGLVQAGGSLRLSCAASGNIFQRRRMGWYRQAPGKERELVATIAYGGNTNYADSVKGRFTISRDNAKNTVYLQMNSLKPEDTAVYYCAAGYSVRWPYRYWGQGTQVTVSS

SEQ ID NO: 37266 - protein, 118 aa, Artificial Sequence
  Chemically Synthesized
QVQLQESGGGLVQAGGSLRLSCAASGTIFLPKYMGWYRQAPGKERELVAAIGKGGITYYADSVKGRFTISRDNAKNTVYLQMNSLKPEDTAVYYCAVDIHDSLGFPYWGQGTQVTVSS

SEQ ID NO: 37267 - protein, 119 aa, Artificial Sequence
  Chemically Synthesized
QVQLQESGGGLVQAGGSLRLSCAASGTISQIYRMGWYRQAPGKERELVATISWGSITYYADSVKGRFTISRDNAKNTVYLQMNSLKPEDTAVYYCAVTLYYYIVAHTYWGQGTQVTVSS

SEQ ID NO: 37268 - protein, 122 aa, Artificial Sequence
  Chemically Synthesized
QVQLQESGGGLVQAGGSLRLSCAASGNISNIPRMGWYRQAPGKERELVATIDSGASTNYADSVKGRFTISRDNAKNTVYLQMNSLKPEDTAVYYCAAGDYYDNEAQYVHLYWGQGTQVTVSS

SEQ ID NO: 37269 - protein, 118 aa, Artificial Sequence
  Chemically Synthesized
QVQLQESGGGLVQAGGSLRLSCAASGNISVQRKMGWYRQAPGKERELVATIDYGSITNYADSVKGRFTISRDNAKNTVYLQMNSLKPEDTAVYYCAVRSPAGYPFLYWGQGTQVTVSS

SEQ ID NO: 37270 - protein, 122 aa, Artificial Sequence
  Chemically Synthesized
QVQLQESGGGLVQAGGSLRLSCAASGYIFFYAGMGWYRQAPGKEREFVAAIGTGTTTYYADSVKGRFTISRDNAKNTVYLQMNSLKPEDTAVYYCAAYPYFRYYYRDYHAYWGQGTQVTVSS

SEQ ID NO: 37271 - protein, 122 aa, Artificial Sequence
  Chemically Synthesized
QVQLQESGGGLVQAGGSLRLSCAASGNIFDPFTMGWYRQAPGKEREFVASISDGATTNYADSVKGRFTISRDNAKNTVYLQMNSLKPEDTAVYYCAAPQYDDGIDYDGYNYWGQGTQVTVSS

SEQ ID NO: 37272 - protein, 125 aa, Artificial Sequence
  Chemically Synthesized
QVQLQESGGGLVQAGGSLRLSCAASGSIFAGYTMGWYRQAPGKERELVASIDLGSTTYYADSVKGRFTISRDNAKNTVYLQMNSLKPEDTAVYYCAVSADTVDISGLALLYIYYWGQGTQVTVSS

SEQ ID NO: 37273 - protein, 118 aa, Artificial Sequence
  Chemically Synthesized
QVQLQESGGGLVQAGGSLRLSCAASGYIFRHVYMGWYRQAPGKEREFVAGINTGSSTYYADSVKGRFTISRDNAKNTVYLQMNSLKPEDTAVYYCAVELVGYPPFDYWGQGTQVTVSS

SEQ ID NO: 37274 - protein, 121 aa, Artificial Sequence
  Chemically Synthesized
QVQLQESGGGLVQAGGSLRLSCAASGYISSLSMGWYRQAPGKEREFVAAIGQGSTTNYADSVKGRFTISRDNAKNTVYLQMNSLKPEDTAVYYCAAIGAEDIKLRDDHPYWGQGTQVTVSS

SEQ ID NO: 37275 - protein, 118 aa, Artificial Sequence
  Chemically Synthesized
QVQLQESGGGLVQAGGSLRLSCAASGTISPGYVMGWYRQAPGKEREFVAGIGDGGSTNYADSVKGRFTISRDNAKNTVYLQMNSLKPEDTAVYYCAVWGSHALTHSYWGQGTQVTVSS

SEQ ID NO: 37276 - protein, 119 aa, Artificial Sequence
  Chemically Synthesized
QVQLQESGGGLVQAGGSLRLSCAASGTIFWRNYMGWYRQAPGKEREFVASISDGGAITYYADSVKGRFTISRDNAKNTVYLQMNSLKPEDTAVYYCAVTYGYPLYHYYWGQGTQVTVSS

SEQ ID NO: 37277 - protein, 119 aa, Artificial Sequence
  Chemically Synthesized
QVQLQESGGGLVQAGGSLRLSCAASGSIFSGSSMGWYRQAPGKERELVAAITRLIPYADSVKGRFTISRDNAKNTVYLQMNSLKPEDTAVYYCAATVDGNYDRESRHYWGQGTQVTVSS

SEQ ID NO: 37278 - protein, 121 aa, Artificial Sequence
  Chemically Synthesized
QVQLQESGGGLVQAGGSLRLSCAASGYIFYAWVMGWYRQAPGKEREFVAAINTTNYADSVKGRFTISRDNAKNTVYLQMNSLKPEDTAVYYCAVLLSTSVLTTKTTTTIYWGQGTQVTVSS

SEQ ID NO: 37279 - protein, 117 aa, Artificial Sequence
  Chemically Synthesized
QVQLQESGGGLVQAGGSLRLSCAASGTIFQIRAMGWYRQAPGKEREFVAGIDDGANTNYADSVKGRFTISRDNAKNTVYLQMNSLKPEDTAVYYCAAGAQSVKNIYWGQGTQVTVSS

SEQ ID NO: 37280 - protein, 118 aa, Artificial Sequence
  Chemically Synthesized
QVQLQESGGGLVQAGGSLRLSCAASGSISPGGYMGWYRQAPGKEREFVAGIGSGGITNYADSVKGRFTISRDNAKNTVYLQMNSLKPEDTAVYYCAVWVGWHADYSYWGQGTQVTVSS

SEQ ID NO: 37281 - protein, 118 aa, Artificial Sequence
  Chemically Synthesized
QVQLQESGGGLVQAGGSLRLSCAASGTIFSKLYMGWYRQAPGKERELVAGIDGGSTTLYADSVKGRFTISRDNAKNTVYLQMNSLKPEDTAVYYCAARTYLERDHTYWGQGTQVTVSS

SEQ ID NO: 37282 - protein, 112 aa, Artificial Sequence
  Chemically Synthesized
QVQLQESGGGLVQAGGSLRLSCAASGSISTASFMGWYRQAPGKERELVAAIDRGGTTYYADSVKGRFTISRDNAKNTVYLQMNSLKPEDTAVYYCAADFAYWGQGTQVTVSS

SEQ ID NO: 37283 - protein, 122 aa, Artificial Sequence
  Chemically Synthesized
QVQLQESGGGLVQAGGSLRLSCAASGTISYTRRMGWYRQAPGKEREFVATIALGTSTNYADSVKGRFTISRDNAKNTVYLQMNSLKPEDTAVYYCAVKVQYWPYYRRAHYYWGQGTQVTVSS

SEQ ID NO: 37284 - protein, 118 aa, Artificial Sequence
  Chemically Synthesized
QVQLQESGGGLVQAGGSLRLSCAASGYIFRLQFMGWYRQAPGKEREFVAGIAFGGTTYYADSVKGRFTISRDNAKNTVYLQMNSLKPEDTAVYYCAVNNGDQDTFDYWGQGTQVTVSS

SEQ ID NO: 37285 - protein, 121 aa, Artificial Sequence
  Chemically Synthesized
QVQLQESGGGLVQAGGSLRLSCAASGTISDPYVMGWYRQAPGKEREFVATITEGTSTYYADSVKGRFTISRDNAKNTVYLQMNSLKPEDTAVYYCAAVARDQGDQSSFMYWGQGTQVTVSS

SEQ ID NO: 37286 - protein, 117 aa, Artificial Sequence
  Chemically Synthesized
QVQLQESGGGLVQAGGSLRLSCAASGNIFVYSDMGWYRQAPGKERELVAGIGWGGITYYADSVKGRFTISRDNAKNTVYLQMNSLKPEDTAVYYCAVHDARTLRFYWGQGTQVTVSS

SEQ ID NO: 37287 - protein, 122 aa, Artificial Sequence
  Chemically Synthesized
QVQLQESGGGLVQAGGSLRLSCAASGTIFRLYAMGWYRQAPGKEREFVATITVGGTTNYADSVKGRFTISRDNAKNTVYLQMNSLKPEDTAVYYCAVGLHDIYEDDDPYRYWGQGTQVTVSS

SEQ ID NO: 37288 - protein, 114 aa, Artificial Sequence
  Chemically Synthesized
QVQLQESGGGLVQAGGSLRLSCAASGNISENHVMGWYRQAPGKERELVATIGHGGNTNYADSVKGRFTISRDNAKNTVYLQMNSLKPEDTAVYYCAVVVSTYYWGQGTQVTVSS

SEQ ID NO: 37289 - protein, 118 aa, Artificial Sequence
  Chemically Synthesized
QVQLQESGGGLVQAGGSLRLSCAASGTIFRYSSMGWYRQAPGKERELVAGITYGTNTNYADSVKGRFTISRDNAKNTVYLQMNSLKPEDTAVYYCAVGAVYYPWHRYWGQGTQVTVSS

SEQ ID NO: 37290 - protein, 122 aa, Artificial Sequence
  Chemically Synthesized
QVQLQESGGGLVQAGGSLRLSCAASGTIFDRTAMGWYRQAPGKERELVASIDYGAITYYADSVKGRFTISRDNAKNTVYLQMNSLKPEDTAVYYCAVDWQLGGLGDYRLAYWGQGTQVTVSS

SEQ ID NO: 37291 - protein, 116 aa, Artificial Sequence
  Chemically Synthesized
QVQLQESGGGLVQAGGSLRLSCAASGYISDGGMGWYRQAPGKERELVAVLLSVVIPYADSVKGRFTISRDNAKNTVYLQMNSLKPEDTAVYYCAAYLYGYHTFYYWGQGTQVTVSS

SEQ ID NO: 37292 - protein, 122 aa, Artificial Sequence
  Chemically Synthesized
QVQLQESGGGLVQAGGSLRLSCAASGYIFPYVAMGWYRQAPGKERELVATIGRGANTYYADSVKGRFTISRDNAKNTVYLQMNSLKPEDTAVYYCAADPNVPDGGNDIHQYWGQGTQVTVSS

SEQ ID NO: 37293 - protein, 118 aa, Artificial Sequence
  Chemically Synthesized
QVQLQESGGGLVQAGGSLRLSCAASGTIFIDLDMGWYRQAPGKEREFVAGIAWGATTYYADSVKGRFTISRDNAKNTVYLQMNSLKPEDTAVYYCAAYLLLLARLRYWGQGTQVTVSS

SEQ ID NO: 37294 - protein, 112 aa, Artificial Sequence
  Chemically Synthesized
QVQLQESGGGLVQAGGSLRLSCAASGNISEYDDMGWYRQAPGKERELVAGITIGGNTNYADSVKGRFTISRDNAKNTVYLQMNSLKPEDTAVYYCAAPYAYWGQGTQVTVSS

SEQ ID NO: 37295 - protein, 118 aa, Artificial Sequence
  Chemically Synthesized
QVQLQESGGGLVQAGGSLRLSCAASGTISTGWVMGWYRQAPGKERELVAAIDRGSNTNYADSVKGRFTISRDNAKNTVYLQMNSLKPEDTAVYYCAVYRVADASFGYWGQGTQVTVSS

SEQ ID NO: 37296 - protein, 118 aa, Artificial Sequence
  Chemically Synthesized
QVQLQESGGGLVQAGGSLRLSCAASGYISWYVYMGWYRQAPGKERELVATISPGGNTNYADSVKGRFTISRDNAKNTVYLQMNSLKPEDTAVYYCAARYYWHPTYGYWGQGTQVTVSS

SEQ ID NO: 37297 - protein, 118 aa, Artificial Sequence
  Chemically Synthesized
QVQLQESGGGLVQAGGSLRLSCAASGNISVYLVMGWYRQAPGKEREFVAAIATGASTNYADSVKGRFTISRDNAKNTVYLQMNSLKPEDTAVYYCAVDRSDIALFYYWGQGTQVTVSS

SEQ ID NO: 37298 - protein, 118 aa, Artificial Sequence
  Chemically Synthesized
QVQLQESGGGLVQAGGSLRLSCAASGYIFPSTIMGWYRQAPGKERELVATINKGSSTNYADSVKGRFTISRDNAKNTVYLQMNSLKPEDTAVYYCAVYSPFYRDYYYWGQGTQVTVSS

SEQ ID NO: 37299 - protein, 126 aa, Artificial Sequence
  Chemically Synthesized
QVQLQESGGGLVQAGGSLRLSCAASGYISRTKRMGWYRQAPGKEREFVASITYGAITNYADSVKGRFTISRDNAKNTVYLQMNSLKPEDTAVYYCAVRDRYWALFNWSIESGHFYWGQGTQVTVSS

SEQ ID NO: 37300 - protein, 118 aa, Artificial Sequence
  Chemically Synthesized
QVQLQESGGGLVQAGGSLRLSCAASGYISHRVRMGWYRQAPGKERELVAAIARGGSTYYADSVKGRFTISRDNAKNTVYLQMNSLKPEDTAVYYCAVYGGWRDLHTYWGQGTQVTVSS

SEQ ID NO: 37301 - protein, 119 aa, Artificial Sequence
  Chemically Synthesized
QVQLQESGGGLVQAGGSLRLSCAASGSISSHSYMGWYRQAPGKERELVATITLGSNTNYADSVKGRFTISRDNAKNTVYLQMNSLKPEDTAVYYCAVPGNTYPPLFWYWGQGTQVTVSS

SEQ ID NO: 37302 - protein, 118 aa, Artificial Sequence
  Chemically Synthesized
QVQLQESGGGLVQAGGSLRLSCAASGTISYSTYMGWYRQAPGKEREFVASINAGGITNYADSVKGRFTISRDNAKNTVYLQMNSLKPEDTAVYYCAVGYQRQDGHPYWGQGTQVTVSS

SEQ ID NO: 37303 - protein, 118 aa, Artificial Sequence
  Chemically Synthesized
QVQLQESGGGLVQAGGSLRLSCAASGNISSVSMGWYRQAPGKERELVAGIDGGGITYYADSVKGRFTISRDNAKNTVYLQMNSLKPEDTAVYYCAAGYDRPTSPHSYWGQGTQVTVSS

SEQ ID NO: 37304 - protein, 110 aa, Artificial Sequence
  Chemically Synthesized
QVQLQESGGGLVQAGGSLRLSCAASGTISRGLNMGWYRQAPGKEREFVAGIDYGANTNYADSVKGRFTISRDNAKNTVYLQMNSLKPEDTAVYYCAVQYWGQGTQVTVSS

SEQ ID NO: 37305 - protein, 117 aa, Artificial Sequence
  Chemically Synthesized
QVQLQESGGGLVQAGGSLRLSCAASGNIFDYWAMGWYRQAPGKERELVATIASVVVPYADSVKGRFTISRDNAKNTVYLQMNSLKPEDTAVYYCAAYYRRGYPHVYWGQGTQVTVSS

SEQ ID NO: 37306 - protein, 122 aa, Artificial Sequence
  Chemically Synthesized
QVQLQESGGGLVQAGGSLRLSCAASGSIFPAGHMGWYRQAPGKEREFVATIDTGTSTNYADSVKGRFTISRDNAKNTVYLQMNSLKPEDTAVYYCAVYYPYGEATVPYLLYWGQGTQVTVSS

SEQ ID NO: 37307 - protein, 122 aa, Artificial Sequence
  Chemically Synthesized
QVQLQESGGGLVQAGGSLRLSCAASGSIFYFAAMGWYRQAPGKEREFVAGIAYGGITYYADSVKGRFTISRDNAKNTVYLQMNSLKPEDTAVYYCAADPDAFPDNPTDHDYWGQGTQVTVSS

SEQ ID NO: 37308 - protein, 118 aa, Artificial Sequence
  Chemically Synthesized
QVQLQESGGGLVQAGGSLRLSCAASGTIFREHLMGWYRQAPGKERELVAGIADGTSTYYADSVKGRFTISRDNAKNTVYLQMNSLKPEDTAVYYCAVDSYVRNSFVYWGQGTQVTVSS

SEQ ID NO: 37309 - protein, 121 aa, Artificial Sequence
  Chemically Synthesized
QVQLQESGGGLVQAGGSLRLSCAASGTISPSYYMGWYRQAPGKEREFVATIGIGTTTNYADSVKGRFTISRDNAKNTVYLQMNSLKPEDTAVYYCAVYPGFDAGDYPHAYWGQGTQVTVSS

SEQ ID NO: 37310 - protein, 121 aa, Artificial Sequence
  Chemically Synthesized
QVQLQESGGGLVQAGGSLRLSCAASGNISGNEHMGWYRQAPGKERELVATINYGASTNYADSVKGRFTISRDNAKNTVYLQMNSLKPEDTAVYYCAVARDDSNAYSLDHYWGQGTQVTVSS

SEQ ID NO: 37311 - protein, 126 aa, Artificial Sequence
  Chemically Synthesized
QVQLQESGGGLVQAGGSLRLSCAASGSISGPTYMGWYRQAPGKEREFVVAIAAGGSTNYADSVKGRFTISRDNAKNTVYLQMNSLKPEDTAVYYCAAVPNRSFLAQVYVGAFYRYWGQGTQVTVSS

SEQ ID NO: 37312 - protein, 126 aa, Artificial Sequence
  Chemically Synthesized
QVQLQESGGGLVQAGGSLRLSCAASGSIFYVGYMGWYRQAPGKERELVASIGPGGITYYADSVKGRFTISRDNAKNTVYLQMNSLKPEDTAVYYCAVYYDTYGYWRTLYHNVFDYWGQGTQVTVSS

SEQ ID NO: 37313 - protein, 122 aa, Artificial Sequence
  Chemically Synthesized
QVQLQESGGGLVQAGGSLRLSCAASGTISDWLGMGWYRQAPGKERELVAGISYGGSTYYADSVKGRFTISRDNAKNTVYLQMNSLKPEDTAVYYCAAYTPITDVSYDLYHYWGQGTQVTVSS

SEQ ID NO: 37314 - protein, 116 aa, Artificial Sequence
  Chemically Synthesized
QVQLQESGGGLVQAGGSLRLSCAASGNIFSRWMGWYRQAPGKERELVAGINEGSNTYYADSVKGRFTISRDNAKNTVYLQMNSLKPEDTAVYYCAVHRSGLTSLYWGQGTQVTVSS

SEQ ID NO: 37315 - protein, 121 aa, Artificial Sequence
  Chemically Synthesized
QVQLQESGGGLVQAGGSLRLSCAASGYISSRTMGWYRQAPGKEREFVAGIDTGANTNYADSVKGRFTISRDNAKNTVYLQMNSLKPEDTAVYYCAAPQRYPYEQTYSHPYWGQGTQVTVSS

SEQ ID NO: 37316 - protein, 117 aa, Artificial Sequence
  Chemically Synthesized
QVQLQESGGGLVQAGGSLRLSCAASGYISYGDVMGWYRQAPGKERELVAGISSGGNTNYADSVKGRFTISRDNAKNTVYLQMNSLKPEDTAVYYCALLTLSIVVLYWGQGTQVTVSS

SEQ ID NO: 37317 - protein, 121 aa, Artificial Sequence
  Chemically Synthesized
QVQLQESGGGLVQAGGSLRLSCAASGNIFPIPYMGWYRQAPGKERELVAGITVVLIPYADSVKGRFTISRDNAKNTVYLQMNSLKPEDTAVYYCAAGYPDVGYYGPRYHYWGQGTQVTVSS

SEQ ID NO: 37318 - protein, 118 aa, Artificial Sequence
  Chemically Synthesized
QVQLQESGGGLVQAGGSLRLSCAASGTISSQGGMGWYRQAPGKEREFVAGITPGTSTNYADSVKGRFTISRDNAKNTVYLQMNSLKPEDTAVYYCAVGALQDDGHAYWGQGTQVTVSS

SEQ ID NO: 37319 - protein, 116 aa, Artificial Sequence
  Chemically Synthesized
QVQLQESGGGLVQAGGSLRLSCAASGTISSTMGWYRQAPGKEREFVATIDVGGSTYYADSVKGRFTISRDNAKNTVYLQMNSLKPEDTAVYYCAVALYSGRDYWYWGQGTQVTVSS

SEQ ID NO: 37320 - protein, 118 aa, Artificial Sequence
  Chemically Synthesized
QVQLQESGGGLVQAGGSLRLSCAASGTISRYYPMGWYRQAPGKERELVATISVGTNTNYADSVKGRFTISRDNAKNTVYLQMNSLKPEDTAVYYCAVWIQPYRLFTYWGQGTQVTVSS

SEQ ID NO: 37321 - protein, 122 aa, Artificial Sequence
  Chemically Synthesized
QVQLQESGGGLVQAGGSLRLSCAASGTIFHARPMGWYRQAPGKEREFVATISRGAITNYADSVKGRFTISRDNAKNTVYLQMNSLKPEDTAVYYCAVQSTPPYVKAYRHGYWGQGTQVTVSS

SEQ ID NO: 37322 - protein, 117 aa, Artificial Sequence
  Chemically Synthesized
QVQLQESGGGLVQAGGSLRLSCAASGTIFSSVDMGWYRQAPGKERELVATIGEGTNTYYADSVKGRFTISRDNAKNTVYLQMNSLKPEDTAVYYCAVNESLLTSIYWGQGTQVTVSS

SEQ ID NO: 37323 - protein, 121 aa, Artificial Sequence
  Chemically Synthesized
QVQLQESGGGLVQAGGSLRLSCAASGTISGYSSMGWYRQAPGKERELVASIGDGSNTNYADSVKGRFTISRDNAKNTVYLQMNSLKPEDTAVYYCAVWTTVTRSLTVSIYWGQGTQVTVSS

SEQ ID NO: 37324 - protein, 126 aa, Artificial Sequence
  Chemically Synthesized
QVQLQESGGGLVQAGGSLRLSCAASGYIFDYVDMGWYRQAPGKEREFVAAISAGGITYYADSVKGRFTISRDNAKNTVYLQMNSLKPEDTAVYYCAVNGGIDTYGGWYDYGRYYYWGQGTQVTVSS

SEQ ID NO: 37325 - protein, 122 aa, Artificial Sequence
  Chemically Synthesized
QVQLQESGGGLVQAGGSLRLSCAASGNISAEYIMGWYRQAPGKERELVAAIGVGGSTYYADSVKGRFTISRDNAKNTVYLQMNSLKPEDTAVYYCAVNGSWLYKRDPWFGYWGQGTQVTVSS

SEQ ID NO: 37326 - protein, 126 aa, Artificial Sequence
  Chemically Synthesized
QVQLQESGGGLVQAGGSLRLSCAASGNISPTPYMGWYRQAPGKERELVAAISFGGSTNYADSVKGRFTISRDNAKNTVYLQMNSLKPEDTAVYYCAVYYKTGYHPLIDYLDDYFYWGQGTQVTVSS

SEQ ID NO: 37327 - protein, 118 aa, Artificial Sequence
  Chemically Synthesized
QVQLQESGGGLVQAGGSLRLSCAASGTISQYRFMGWYRQAPGKERELVATIDEGGNTNYADSVKGRFTISRDNAKNTVYLQMNSLKPEDTAVYYCAVSTQDYDTFYYWGQGTQVTVSS

SEQ ID NO: 37328 - protein, 126 aa, Artificial Sequence
  Chemically Synthesized
QVQLQESGGGLVQAGGSLRLSCAASGTISSNTRMGWYRQAPGKERELVATIDYGASTNYADSVKGRFTISRDNAKNTVYLQMNSLKPEDTAVYYCAAPRNAGDYPYPGAYVDYQYWGQGTQVTVSS

SEQ ID NO: 37329 - protein, 117 aa, Artificial Sequence
  Chemically Synthesized
QVQLQESGGGLVQAGGSLRLSCAASGNISRRYDMGWYRQAPGKEREFVATIADGASTYADSVKGRFTISRDNAKNTVYLQMNSLKPEDTAVYYCAARGDPRDGHYYWGQGTQVTVSS

SEQ ID NO: 37330 - protein, 118 aa, Artificial Sequence
  Chemically Synthesized
QVQLQESGGGLVQAGGSLRLSCAASGYIFAAVVMGWYRQAPGKERELVATISYGANTYYADSVKGRFTISRDNAKNTVYLQMNSLKPEDTAVYYCAVADLSYHEHYYWGQGTQVTVSS

SEQ ID NO: 37331 - protein, 122 aa, Artificial Sequence
  Chemically Synthesized
QVQLQESGGGLVQAGGSLRLSCAASGSISAYLGMGWYRQAPGKERELVATIDVGATTYYADSVKGRFTISRDNAKNTVYLQMNSLKPEDTAVYYCAVKPSYGGVTTDALRYWGQGTQVTVSS

SEQ ID NO: 37332 - protein, 122 aa, Artificial Sequence
  Chemically Synthesized
QVQLQESGGGLVQAGGSLRLSCAASGTISYDPYMGWYRQAPGKEREFVATISDGSNTNYADSVKGRFTISRDNAKNTVYLQMNSLKPEDTAVYYCAAQYVKYGYVWADLGYWGQGTQVTVSS

SEQ ID NO: 37333 - protein, 107 aa, Artificial Sequence
  Chemically Synthesized
QVQLQESGGGLVQAGGSLRLSCAASGTISWLRSMGWYRQAPGKERELYADSVKGRFTISRDNAKNTVYLQMNSLKPEDTAVYYCAVDSSYGNSFRYWGQGTQVTVSS

SEQ ID NO: 37334 - protein, 118 aa, Artificial Sequence
  Chemically Synthesized
QVQLQESGGGLVQAGGSLRLSCAASGSISHHTDMGWYRQAPGKERELVAGIGGGATTNYADSVKGRFTISRDNAKNTVYLQMNSLKPEDTAVYYCAVRQVQGNWHDYWGQGTQVTVSS

SEQ ID NO: 37335 - protein, 117 aa, Artificial Sequence
  Chemically Synthesized
QVQLQESGGGLVQAGGSLRLSCAASGTIFRYSMGWYRQAPGKERELVASITRGSITYYADSVKGRFTISRDNAKNTVYLQMNSLKPEDTAVYYCAVYGFVRASFPYWGQGTQVTVSS

SEQ ID NO: 37336 - protein, 118 aa, Artificial Sequence
  Chemically Synthesized
QVQLQESGGGLVQAGGSLRLSCAASGNIFQADYMGWYRQAPGKEREFVAAITSGGNTNYADSVKGRFTISRDNAKNTVYLQMNSLKPEDTAVYYCAVDDPYISDLDYWGQGTQVTVSS

SEQ ID NO: 37337 - protein, 118 aa, Artificial Sequence
  Chemically Synthesized
QVQLQESGGGLVQAGGSLRLSCAASGSISSFVAMGWYRQAPGKERELVASINIGGTTNYADSVKGRFTISRDNAKNTVYLQMNSLKPEDTAVYYCAVYIQAYDDHYYWGQGTQVTVSS

SEQ ID NO: 37338 - protein, 122 aa, Artificial Sequence
  Chemically Synthesized
QVQLQESGGGLVQAGGSLRLSCAASGNISTSHRMGWYRQAPGKERELVASISTGAITNYADSVKGRFTISRDNAKNTVYLQMNSLKPEDTAVYYCAAVFFHPWPGPYIHRYWGQGTQVTVSS

SEQ ID NO: 37339 - protein, 118 aa, Artificial Sequence
  Chemically Synthesized
QVQLQESGGGLVQAGGSLRLSCAASGYISYYSNMGWYRQAPGKEREFVAGIDDGTSTYYADSVKGRFTISRDNAKNTVYLQMNSLKPEDTAVYYCAVRTDDAGLYLYWGQGTQVTVSS

SEQ ID NO: 37340 - protein, 118 aa, Artificial Sequence
  Chemically Synthesized
QVQLQESGGGLVQAGGSLRLSCAASGTIFHGVDMGWYRQAPGKERELVATINPGGTTNYADSVKGRFTISRDNAKNTVYLQMNSLKPEDTAVYYCAATWTAPTGHVYWGQGTQVTVSS

SEQ ID NO: 37341 - protein, 118 aa, Artificial Sequence
  Chemically Synthesized
QVQLQESGGGLVQAGGSLRLSCAASGYISYYFAMGWYRQAPGKERELVAAIDYGGSTYYADSVKGRFTISRDNAKNTVYLQMNSLKPEDTAVYYCAARSPYWRGHDYWGQGTQVTVSS

SEQ ID NO: 37342 - protein, 122 aa, Artificial Sequence
  Chemically Synthesized
QVQLQESGGGLVQAGGSLRLSCAASGNISARFYMGWYRQAPGKEREFVAAIANGGSTYYADSVKGRFTISRDNAKNTVYLQMNSLKPEDTAVYYCAAYYYYWYGGDRVLGYWGQGTQVTVSS

SEQ ID NO: 37343 - protein, 115 aa, Artificial Sequence
  Chemically Synthesized
QVQLQESGGGLVQAGGSLRLSCAASGYISYAYYMGWYRQAPGKEREFVAGITQGANTNYADSVKGRFTISRDNAKNTVYLQMNSLKPEDTAVYYCAVFNPGFYYWGQGTQVTVSS

SEQ ID NO: 37344 - protein, 118 aa, Artificial Sequence
  Chemically Synthesized
QVQLQESGGGLVQAGGSLRLSCAASGYISYRLSMGWYRQAPGKEREFVAGIGTGTSTYYADSVKGRFTISRDNAKNTVYLQMNSLKPEDTAVYYCAARSYIYYGHGYWGQGTQVTVSS

SEQ ID NO: 37345 - protein, 122 aa, Artificial Sequence
  Chemically Synthesized
QVQLQESGGGLVQAGGSLRLSCAASGTISYYDGMGWYRQAPGKEREFVAAISDGGTTYYADSVKGRFTISRDNAKNTVYLQMNSLKPEDTAVYYCAASYGADGYFDGGFTYWGQGTQVTVSS

SEQ ID NO: 37346 - protein, 125 aa, Artificial Sequence
  Chemically Synthesized
QVQLQESGGGLVQAGGSLRLSCAASGYIFRHYDMGWYRQAPGKEREFVATIGRGTITNYADSVKGRFTISRDNAKNTVYLQMNSLKPEDTAVYYCAVVPVTKYDLGWYSDRHSYWGQGTQVTVSS

SEQ ID NO: 37347 - protein, 118 aa, Artificial Sequence
  Chemically Synthesized
QVQLQESGGGLVQAGGSLRLSCAASGNISYLLSMGWYRQAPGKERELVAAIAGGSSTYYADSVKGRFTISRDNAKNTVYLQMNSLKPEDTAVYYCAADLPTGRAHNYWGQGTQVTVSS

SEQ ID NO: 37348 - protein, 118 aa, Artificial Sequence
  Chemically Synthesized
QVQLQESGGGLVQAGGSLRLSCAASGSISRDERMGWYRQAPGKERELVAAIGIGGSTYYADSVKGRFTISRDNAKNTVYLQMNSLKPEDTAVYYCAVRYYYETTFIYWGQGTQVTVSS

SEQ ID NO: 37349 - protein, 118 aa, Artificial Sequence
  Chemically Synthesized
QVQLQESGGGLVQAGGSLRLSCAASGSISDDSLMGWYRQAPGKEREFVASIGSGANTNYADSVKGRFTISRDNAKNTVYLQMNSLKPEDTAVYYCAVDLGSQGEHPYWGQGTQVTVSS

SEQ ID NO: 37350 - protein, 117 aa, Artificial Sequence
  Chemically Synthesized
QVQLQESGGGLVQAGGSLRLSCAASGTISTGTGMGWYRQAPGKEREFVASIAIGAITNYADSVKGRFTISRDNAKNTVYLQMNSLKPEDTAVYYCAADSVSTLTLYWGQGTQVTVSS

SEQ ID NO: 37351 - protein, 118 aa, Artificial Sequence
  Chemically Synthesized
QVQLQESGGGLVQAGGSLRLSCAASGSIFYVIRMGWYRQAPGKEREFVASIDKGGTTYYADSVKGRFTISRDNAKNTVYLQMNSLKPEDTAVYYCAAYRRRHWQHLYWGQGTQVTVSS

SEQ ID NO: 37352 - protein, 122 aa, Artificial Sequence
  Chemically Synthesized
QVQLQESGGGLVQAGGSLRLSCAASGTIFRYRVMGWYRQAPGKERELVASITTGTNTNYADSVKGRFTISRDNAKNTVYLQMNSLKPEDTAVYYCAAQPTYDPYGQGILDYWGQGTQVTVSS

SEQ ID NO: 37353 - protein, 109 aa, Artificial Sequence
  Chemically Synthesized
QVQLQESGGGLVQAGGSLRLSCAASGTIFLYSYMGWYRQAPGKERELVASIGSGAITYYADSVKGRFTISRDNAKNTVYLQMNSLKPEDTAVYYCAVYWGQGTQVTVSS

SEQ ID NO: 37354 - protein, 121 aa, Artificial Sequence
  Chemically Synthesized
QVQLQESGGGLVQAGGSLRLSCAASGTISVVNQMGWYRQAPGKERELVAGISYGASTNYADSVKGRFTISRDNAKNTVYLQMNSLKPEDTAVYYCAVRGYETLIDSKFFYWGQGTQVTVSS

SEQ ID NO: 37355 - protein, 118 aa, Artificial Sequence
  Chemically Synthesized
QVQLQESGGGLVQAGGSLRLSCAASGSIFQSWYMGWYRQAPGKEREFVAAISTGTSTNYADSVKGRFTISRDNAKNTVYLQMNSLKPEDTAVYYCAVTGLYNPWYWYWGQGTQVTVSS

SEQ ID NO: 37356 - protein, 118 aa, Artificial Sequence
  Chemically Synthesized
QVQLQESGGGLVQAGGSLRLSCAASGSIFGTRTMGWYRQAPGKEREFVAAITQGTITYYADSVKGRFTISRDNAKNTVYLQMNSLKPEDTAVYYCAAGEHADYPLRYWGQGTQVTVSS

SEQ ID NO: 37357 - protein, 122 aa, Artificial Sequence
  Chemically Synthesized
QVQLQESGGGLVQAGGSLRLSCAASGTIFTSYYMGWYRQAPGKEREFVAGIDSGANTYYADSVKGRFTISRDNAKNTVYLQMNSLKPEDTAVYYCAADYHQYGWDNYYYRYWGQGTQVTVSS

SEQ ID NO: 37358 - protein, 122 aa, Artificial Sequence
  Chemically Synthesized
QVQLQESGGGLVQAGGSLRLSCAASGNISVSEWMGWYRQAPGKEREFVAGIAYGSITYYADSVKGRFTISRDNAKNTVYLQMNSLKPEDTAVYYCAAYSGRNWDLDGDYYYWGQGTQVTVSS

SEQ ID NO: 37359 - protein, 122 aa, Artificial Sequence
  Chemically Synthesized
QVQLQESGGGLVQAGGSLRLSCAASGSISWRKYMGWYRQAPGKERELVAAIDYGGNTYYADSVKGRFTISRDNAKNTVYLQMNSLKPEDTAVYYCAVSQPWYALSRYYYAYWGQGTQVTVSS

SEQ ID NO: 37360 - protein, 122 aa, Artificial Sequence
  Chemically Synthesized
QVQLQESGGGLVQAGGSLRLSCAASGSISGDYPMGWYRQAPGKEREFVAAISEGSNTNYADSVKGRFTISRDNAKNTVYLQMNSLKPEDTAVYYCAAWHDGEAYYKRRLGYWGQGTQVTVSS

SEQ ID NO: 37361 - protein, 123 aa, Artificial Sequence
  Chemically Synthesized
QVQLQESGGGLVQAGGSLRLSCAASGTISPSAYMGWYRQAPGKEREFVAAIGTGSTTNYADSVKGRFTISRDNAKNTVYLQMNSLKPEDTAVYYCAVVTDYIDDYGSGLLYYWGQGTQVTVSS

SEQ ID NO: 37362 - protein, 113 aa, Artificial Sequence
  Chemically Synthesized
QVQLQESGGGLVQAGGSLRLSCAASGNIFYDYPMGWYRQAPGKEREFVATIGFGGSTYYADSVKGRFTISRDNAKNTVYLQMNSLKPEDTAVYYCAVGGAEYWGQGTQVTVSS

SEQ ID NO: 37363 - protein, 122 aa, Artificial Sequence
  Chemically Synthesized
QVQLQESGGGLVQAGGSLRLSCAASGTISYGVYMGWYRQAPGKEREFVAAIALGTITNYADSVKGRFTISRDNAKNTVYLQMNSLKPEDTAVYYCAAWRAYQADYVDLYAYWGQGTQVTVSS

SEQ ID NO: 37364 - protein, 118 aa, Artificial Sequence
  Chemically Synthesized
QVQLQESGGGLVQAGGSLRLSCAASGSISGRGWMGWYRQAPGKEREFVASINSGAITYYADSVKGRFTISRDNAKNTVYLQMNSLKPEDTAVYYCAATAYYYGYYAYWGQGTQVTVSS

SEQ ID NO: 37365 - protein, 120 aa, Artificial Sequence
  Chemically Synthesized
QVQLQESGGGLVQAGGSLRLSCAASGTIFGYVDMGWYRQAPGKEREFVAAIDHDYLYADSVKGRFTISRDNAKNTVYLQMNSLKPEDTAVYYCAAADYGVYSSRWRYYYWGQGTQVTVSS

SEQ ID NO: 37366 - protein, 122 aa, Artificial Sequence
  Chemically Synthesized
QVQLQESGGGLVQAGGSLRLSCAASGTISYTTDMGWYRQAPGKEREFVATIDYGGITNYADSVKGRFTISRDNAKNTVYLQMNSLKPEDTAVYYCAVGQYTGYYPYYYHWYWGQGTQVTVSS

SEQ ID NO: 37367 - protein, 113 aa, Artificial Sequence
  Chemically Synthesized
QVQLQESGGGLVQAGGSLRLSCAASGSISRLPDMGWYRQAPGKEREFVAAITPYADSVKGRFTISRDNAKNTVYLQMNSLKPEDTAVYYCAVNDDYRRPLPYWGQGTQVTVSS

SEQ ID NO: 37368 - protein, 118 aa, Artificial Sequence
  Chemically Synthesized
QVQLQESGGGLVQAGGSLRLSCAASGNISYPQGMGWYRQAPGKERELVASIGYGTSTNYADSVKGRFTISRDNAKNTVYLQMNSLKPEDTAVYYCAASQDNYLPYRYWGQGTQVTVSS

SEQ ID NO: 37369 - protein, 117 aa, Artificial Sequence
  Chemically Synthesized
QVQLQESGGGLVQAGGSLRLSCAASGNIFWYTPMGWYRQAPGKERELVAGISDGANTNYADSVKGRFTISRDNAKNTVYLQMNSLKPEDTAVYYCAAPFDPDYFDYWGQGTQVTVSS

SEQ ID NO: 37370 - protein, 122 aa, Artificial Sequence
  Chemically Synthesized
QVQLQESGGGLVQAGGSLRLSCAASGNISDGFYMGWYRQAPGKEREFVATIDTGSITNYADSVKGRFTISRDNAKNTVYLQMNSLKPEDTAVYYCAVRTESVGRYPVTYPYWGQGTQVTVSS

SEQ ID NO: 37371 - protein, 118 aa, Artificial Sequence
  Chemically Synthesized
QVQLQESGGGLVQAGGSLRLSCAASGTISGITDMGWYRQAPGKEREFVAGISIRWYYQYADSVKGRFTISRDNAKNTVYLQMNSLKPEDTAVYYCAAAKPYGVWYGYWGQGTQVTVSS

SEQ ID NO: 37372 - protein, 118 aa, Artificial Sequence
  Chemically Synthesized
QVQLQESGGGLVQAGGSLRLSCAASGNIFQWYYMGWYRQAPGKEREFVAAIAYGAITNYADSVKGRFTISRDNAKNTVYLQMNSLKPEDTAVYYCAAYTGNELYFPYWGQGTQVTVSS

SEQ ID NO: 37373 - protein, 126 aa, Artificial Sequence
  Chemically Synthesized
QVQLQESGGGLVQAGGSLRLSCAASGSISGQARMGWYRQAPGKEREFVAAITVGGSTYYADSVKGRFTISRDNAKNTVYLQMNSLKPEDTAVYYCAVRYVTVWDWIRNRLVPFYYWGQGTQVTVSS

SEQ ID NO: 37374 - protein, 117 aa, Artificial Sequence
  Chemically Synthesized
QVQLQESGGGLVQAGGSLRLSCAASGTIFPSVMGWYRQAPGKEREFVAGIDLGSTTNYADSVKGRFTISRDNAKNTVYLQMNSLKPEDTAVYYCAVAFTEVWTLVYWGQGTQVTVSS

SEQ ID NO: 37375 - protein, 118 aa, Artificial Sequence
  Chemically Synthesized
QVQLQESGGGLVQAGGSLRLSCAASGTISGPPYMGWYRQAPGKERELVATIADGTNTNYADSVKGRFTISRDNAKNTVYLQMNSLKPEDTAVYYCAADGPYAWLLWYWGQGTQVTVSS

SEQ ID NO: 37376 - protein, 123 aa, Artificial Sequence
  Chemically Synthesized
QVQLQESGGGLVQAGGSLRLSCAASGYISKPDDMGWYRQAPGKERELVAAIGYGSSTYYADSVKGRFTISRDNAKNTVYLQMNSLKPEDTAVYYCAVLFYSRRYADGKWLIYWGQGTQVTVSS

SEQ ID NO: 37377 - protein, 113 aa, Artificial Sequence
  Chemically Synthesized
QVQLQESGGGLVQAGGSLRLSCAASGTISGDWEMGWYRQAPGKEREFVAAINGGSTNTYYADSVKGRFTISRDNAKNTVYLQMNSLKPEDTAVYYCAVGLDYWGQGTQVTVSS

SEQ ID NO: 37378 - protein, 118 aa, Artificial Sequence
  Chemically Synthesized
QVQLQESGGGLVQAGGSLRLSCAASGSIFNISIMGWYRQAPGKERELVASIDSGGTTYYADSVKGRFTISRDNAKNTVYLQMNSLKPEDTAVYYCAVFASDNSGYYYWGQGTQVTVSS

SEQ ID NO: 37379 - protein, 122 aa, Artificial Sequence
  Chemically Synthesized
QVQLQESGGGLVQAGGSLRLSCAASGNISPFDKMGWYRQAPGKERELVASINIGGTTYYADSVKGRFTISRDNAKNTVYLQMNSLKPEDTAVYYCAAYPDADDTLADFHAYWGQGTQVTVSS

SEQ ID NO: 37380 - protein, 109 aa, Artificial Sequence
  Chemically Synthesized
QVQLQESGGGLVQAGGSLRLSCAASGTISVRSFMGWYRQAPGKERELLPLLLLVLVPYADSVKGRFTISRDNAKNTVYLQMNSLKPEDTAVYYCAAVYWGQGTQVTVSS

SEQ ID NO: 37381 - protein, 111 aa, Artificial Sequence
  Chemically Synthesized
QVQLQESGGGLVQAGGSLRLSCAASGYIFGLYSMGWYRQAPGKERETVVLPYADSVKGRFTISRDNAKNTVYLQMNSLKPEDTAVYYCAVRDDTDRSHDYWGQGTQVTVSS

SEQ ID NO: 37382 - protein, 122 aa, Artificial Sequence
  Chemically Synthesized
QVQLQESGGGLVQAGGSLRLSCAASGYISYTTYMGWYRQAPGKERELVAGITVGTITNYADSVKGRFTISRDNAKNTVYLQMNSLKPEDTAVYYCAADQAYRQRDLYDFNYWGQGTQVTVSS

SEQ ID NO: 37383 - protein, 118 aa, Artificial Sequence
  Chemically Synthesized
QVQLQESGGGLVQAGGSLRLSCAASGTISDWDFMGWYRQAPGKERELVASISYGGNTYYADSVKGRFTISRDNAKNTVYLQMNSLKPEDTAVYYCAVYNYLTYRHYYWGQGTQVTVSS

SEQ ID NO: 37384 - protein, 122 aa, Artificial Sequence
  Chemically Synthesized
QVQLQESGGGLVQAGGSLRLSCAASGSIFRPLVMGWYRQAPGKEREFVAGIDSGSTTNYADSVKGRFTISRDNAKNTVYLQMNSLKPEDTAVYYCAAASEGTLLFDADYTYWGQGTQVTVSS

SEQ ID NO: 37385 - protein, 126 aa, Artificial Sequence
  Chemically Synthesized
QVQLQESGGGLVQAGGSLRLSCAASGSISAYGKMGWYRQAPGKEREFVASISIGSTTNYADSVKGRFTISRDNAKNTVYLQMNSLKPEDTAVYYCAAYDSTDGRTYPRTRDRLGYWGQGTQVTVSS

SEQ ID NO: 37386 - protein, 126 aa, Artificial Sequence
  Chemically Synthesized
QVQLQESGGGLVQAGGSLRLSCAASGYISDQDLMGWYRQAPGKERELVAAISYGAITYYADSVKGRFTISRDNAKNTVYLQMNSLKPEDTAVYYCAVNTDATYVYQLERDSALLYWGQGTQVTVSS

SEQ ID NO: 37387 - protein, 125 aa, Artificial Sequence
  Chemically Synthesized
QVQLQESGGGLVQAGGSLRLSCAASGSIFEGSVMGWYRQAPGKEREFVAAIGDGGNTNYADSVKGRFTISRDNAKNTVYLQMNSLKPEDTAVYYCAARYGGRLVWYYIDGIYTYWGQGTQVTVSS

SEQ ID NO: 37388 - protein, 118 aa, Artificial Sequence
  Chemically Synthesized
QVQLQESGGGLVQAGGSLRLSCAASGYISRWYGMGWYRQAPGKEREFVAGIAYGATTYYADSVKGRFTISRDNAKNTVYLQMNSLKPEDTAVYYCAAYYYYSRYYRYWGQGTQVTVSS

SEQ ID NO: 37389 - protein, 122 aa, Artificial Sequence
  Chemically Synthesized
QVQLQESGGGLVQAGGSLRLSCAASGSISRPYWMGWYRQAPGKEREFVATITKGAITYYADSVKGRFTISRDNAKNTVYLQMNSLKPEDTAVYYCAVLYPSYFYIYGRHAYWGQGTQVTVSS

SEQ ID NO: 37390 - protein, 117 aa, Artificial Sequence
  Chemically Synthesized
QVQLQESGGGLVQAGGSLRLSCAASGTIFDGPAMGWYRQAPGKEREFVATIGRGAITYYADSVKGRFTISRDNAKNTVYLQMNSLKPEDTAVYYCAVLVLTLFCMYWGQGTQVTVSS

SEQ ID NO: 37391 - protein, 122 aa, Artificial Sequence
  Chemically Synthesized
QVQLQESGGGLVQAGGSLRLSCAASGYISFINWMGWYRQAPGKEREFVASIDRGGNTNYADSVKGRFTISRDNAKNTVYLQMNSLKPEDTAVYYCAATDDRRRDLGRDHYYWGQGTQVTVSS

SEQ ID NO: 37392 - protein, 117 aa, Artificial Sequence
  Chemically Synthesized
QVQLQESGGGLVQAGGSLRLSCAASGTISRRGYMGWYRQAPGKERELVATISGSNTYYADSVKGRFTISRDNAKNTVYLQMNSLKPEDTAVYYCAVLPGWVRWFYYWGQGTQVTVSS

SEQ ID NO: 37393 - protein, 117 aa, Artificial Sequence
  Chemically Synthesized
QVQLQESGGGLVQAGGSLRLSCAASGNIFPDAPMGWYRQAPGKEREFVAAIDAGANTNYADSVKGRFTISRDNAKNTVYLQMNSLKPEDTAVYYCAVLTRNTTTLYWGQGTQVTVSS

SEQ ID NO: 37394 - protein, 118 aa, Artificial Sequence
  Chemically Synthesized
QVQLQESGGGLVQAGGSLRLSCAASGNISYILYMGWYRQAPGKEREFVAAINGGGSTYYADSVKGRFTISRDNAKNTVYLQMNSLKPEDTAVYYCAAVRYTKRLLRYWGQGTQVTVSS

SEQ ID NO: 37395 - protein, 118 aa, Artificial Sequence
  Chemically Synthesized
QVQLQESGGGLVQAGGSLRLSCAASGTIFYYAVMGWYRQAPGKEREFVASISLGSNTNYADSVKGRFTISRDNAKNTVYLQMNSLKPEDTAVYYCAAGFTVVPPHVYWGQGTQVTVSS

SEQ ID NO: 37396 - protein, 118 aa, Artificial Sequence
  Chemically Synthesized
QVQLQESGGGLVQAGGSLRLSCAASGTISNAGLMGWYRQAPGKEREFVAGIGSGTTTYYADSVKGRFTISRDNAKNTVYLQMNSLKPEDTAVYYCAVHNWPYVHLDYWGQGTQVTVSS

SEQ ID NO: 37397 - protein, 118 aa, Artificial Sequence
  Chemically Synthesized
QVQLQESGGGLVQAGGSLRLSCAASGTISVGLDMGWYRQAPGKEREFVATINQGGITNYADSVKGRFTISRDNAKNTVYLQMNSLKPEDTAVYYCAVHPDSHFAYSYWGQGTQVTVSS

SEQ ID NO: 37398 - protein, 117 aa, Artificial Sequence
  Chemically Synthesized
QVQLQESGGGLVQAGGSLRLSCAASGSIFDDTMGWYRQAPGKERELVAAINAGTNTNYADSVKGRFTISRDNAKNTVYLQMNSLKPEDTAVYYCAVYWDHYDLHSYWGQGTQVTVSS

SEQ ID NO: 37399 - protein, 118 aa, Artificial Sequence
  Chemically Synthesized
QVQLQESGGGLVQAGGSLRLSCAASGNIFPWYFMGWYRQAPGKEREFVASISYGGTTNYADSVKGRFTISRDNAKNTVYLQMNSLKPEDTAVYYCAAARYLYSYHVYWGQGTQVTVSS

SEQ ID NO: 37400 - protein, 126 aa, Artificial Sequence
  Chemically Synthesized
QVQLQESGGGLVQAGGSLRLSCAASGNIFYGYIMGWYRQAPGKEREFVAGITHGGTTNYADSVKGRFTISRDNAKNTVYLQMNSLKPEDTAVYYCAVDYRDVTWPTWRYWRYHWYWGQGTQVTVSS

SEQ ID NO: 37401 - protein, 122 aa, Artificial Sequence
  Chemically Synthesized
QVQLQESGGGLVQAGGSLRLSCAASGTISYSYDMGWYRQAPGKERELVAGIATGTSTYYADSVKGRFTISRDNAKNTVYLQMNSLKPEDTAVYYCAAVNYANPFWDADHWYWGQGTQVTVSS

SEQ ID NO: 37402 - protein, 118 aa, Artificial Sequence
  Chemically Synthesized
QVQLQESGGGLVQAGGSLRLSCAASGNISYYTYMGWYRQAPGKERELVAAIASGGTTYYADSVKGRFTISRDNAKNTVYLQMNSLKPEDTAVYYCAARPYPFYPLWYWGQGTQVTVSS

SEQ ID NO: 37403 - protein, 122 aa, Artificial Sequence
  Chemically Synthesized
QVQLQESGGGLVQAGGSLRLSCAASGNISIPVYMGWYRQAPGKEREFVATIGFGASTYYADSVKGRFTISRDNAKNTVYLQMNSLKPEDTAVYYCAAWGLDVTVYSYDHTYWGQGTQVTVSS

SEQ ID NO: 37404 - protein, 116 aa, Artificial Sequence
  Chemically Synthesized
QVQLQESGGGLVQAGGSLRLSCAASGTIFTPDAMGWYRQAPGKEREFVAVLVTVVIPYADSVKGRFTISRDNAKNTVYLQMNSLKPEDTAVYYCAVTSVFSVVIYWGQGTQVTVSS

SEQ ID NO: 37405 - protein, 121 aa, Artificial Sequence
  Chemically Synthesized
QVQLQESGGGLVQAGGSLRLSCAASGYISGGSMGWYRQAPGKEREFVAAISYGGSTNYADSVKGRFTISRDNAKNTVYLQMNSLKPEDTAVYYCAAGSTDYNLGYYKLAYWGQGTQVTVSS

SEQ ID NO: 37406 - protein, 118 aa, Artificial Sequence
  Chemically Synthesized
QVQLQESGGGLVQAGGSLRLSCAASGTIFSPLNMGWYRQAPGKERELVATIDAGSITNYADSVKGRFTISRDNAKNTVYLQMNSLKPEDTAVYYCAAFRAGYYEHQYWGQGTQVTVSS

SEQ ID NO: 37407 - protein, 118 aa, Artificial Sequence
  Chemically Synthesized
QVQLQESGGGLVQAGGSLRLSCAASGSIFYDYYMGWYRQAPGKERELVASISVGASTYYADSVKGRFTISRDNAKNTVYLQMNSLKPEDTAVYYCAAVPDAQPWYLYWGQGTQVTVSS

SEQ ID NO: 37408 - protein, 122 aa, Artificial Sequence
  Chemically Synthesized
QVQLQESGGGLVQAGGSLRLSCAASGNISSGSIMGWYRQAPGKERELVATISNGGTTYYADSVKGRFTISRDNAKNTVYLQMNSLKPEDTAVYYCAVWAKRRARTWTYYPYWGQGTQVTVSS

SEQ ID NO: 37409 - protein, 118 aa, Artificial Sequence
  Chemically Synthesized
QVQLQESGGGLVQAGGSLRLSCAASGSIFRLYSMGWYRQAPGKEREFVATIDLGGNTYYADSVKGRFTISRDNAKNTVYLQMNSLKPEDTAVYYCAAPHHRSPRHYYWGQGTQVTVSS

SEQ ID NO: 37410 - protein, 117 aa, Artificial Sequence
  Chemically Synthesized
QVQLQESGGGLVQAGGSLRLSCAASGNISANTPMGWYRQAPGKERELVVVLLPYADSVKGRFTISRDNAKNTVYLQMNSLKPEDTAVYYCAAVARIYLDELDLYNYWGQGTQVTVSS

SEQ ID NO: 37411 - protein, 111 aa, Artificial Sequence
  Chemically Synthesized
QVQLQESGGGLVQAGGSLRLSCAASGNISRVIVMGWYRQAPGKERELVAAIDPGSSTNYADSVKGRFTISRDNAKNTVYLQMNSLKPEDTAVYYCAAFWYWGQGTQVTVSS

SEQ ID NO: 37412 - protein, 117 aa, Artificial Sequence
  Chemically Synthesized
QVQLQESGGGLVQAGGSLRLSCAASGNISHSVMGWYRQAPGKERELVASIARGSTTNYADSVKGRFTISRDNAKNTVYLQMNSLKPEDTAVYYCAAYYEHLNVLSYWGQGTQVTVSS

SEQ ID NO: 37413 - protein, 118 aa, Artificial Sequence
  Chemically Synthesized
QVQLQESGGGLVQAGGSLRLSCAASGTIFFYSYMGWYRQAPGKERELVAGIGKGSSTNYADSVKGRFTISRDNAKNTVYLQMNSLKPEDTAVYYCAARSYASGWHVYWGQGTQVTVSS

SEQ ID NO: 37414 - protein, 118 aa, Artificial Sequence
  Chemically Synthesized
QVQLQESGGGLVQAGGSLRLSCAASGTISKYTAMGWYRQAPGKEREFVASINDGSSTNYADSVKGRFTISRDNAKNTVYLQMNSLKPEDTAVYYCAAVTGDIKAYVYWGQGTQVTVSS

SEQ ID NO: 37415 - protein, 117 aa, Artificial Sequence
  Chemically Synthesized
QVQLQESGGGLVQAGGSLRLSCAASGTIFLLRMGWYRQAPGKERELVAGIGYGATTNYADSVKGRFTISRDNAKNTVYLQMNSLKPEDTAVYYCAAPSNSGDNHRYWGQGTQVTVSS

SEQ ID NO: 37416 - protein, 118 aa, Artificial Sequence
  Chemically Synthesized
QVQLQESGGGLVQAGGSLRLSCAASGTIFPWSTMGWYRQAPGKEREFVATIANGTSTYYADSVKGRFTISRDNAKNTVYLQMNSLKPEDTAVYYCAVPTIYRAYYAYWGQGTQVTVSS

SEQ ID NO: 37417 - protein, 118 aa, Artificial Sequence
  Chemically Synthesized
QVQLQESGGGLVQAGGSLRLSCAASGNISRYENMGWYRQAPGKERELVASIGQGGNTNYADSVKGRFTISRDNAKNTVYLQMNSLKPEDTAVYYCAVRRRLYSRHTYWGQGTQVTVSS

SEQ ID NO: 37418 - protein, 122 aa, Artificial Sequence
  Chemically Synthesized
QVQLQESGGGLVQAGGSLRLSCAASGYISGLSEMGWYRQAPGKEREFVAGISDGGTTYYADSVKGRFTISRDNAKNTVYLQMNSLKPEDTAVYYCAVYLYFREYYYRDHLYWGQGTQVTVSS

SEQ ID NO: 37419 - protein, 122 aa, Artificial Sequence
  Chemically Synthesized
QVQLQESGGGLVQAGGSLRLSCAASGTIFGTDPMGWYRQAPGKEREFVAAIGSGGTTNYADSVKGRFTISRDNAKNTVYLQMNSLKPEDTAVYYCAALQSISNQGPGQYYYWGQGTQVTVSS

SEQ ID NO: 37420 - protein, 116 aa, Artificial Sequence
  Chemically Synthesized
QVQLQESGGGLVQAGGSLRLSCAASGYISYFDGMGWYRQAPGKERELVAAINLGANTNYADSVKGRFTISRDNAKNTVYLQMNSLKPEDTAVYYCAVPWPSILSYWGQGTQVTVSS

SEQ ID NO: 37421 - protein, 121 aa, Artificial Sequence
  Chemically Synthesized
QVQLQESGGGLVQAGGSLRLSCAASGTISTGSPMGWYRQAPGKEREFVASIDYGASTYYADSVKGRFTISRDNAKNTVYLQMNSLKPEDTAVYYCAVVDDYSSSVYLFDYWGQGTQVTVSS

SEQ ID NO: 37422 - protein, 122 aa, Artificial Sequence
  Chemically Synthesized
QVQLQESGGGLVQAGGSLRLSCAASGSIFWLRYMGWYRQAPGKERELVAAIAHGGTTYYADSVKGRFTISRDNAKNTVYLQMNSLKPEDTAVYYCAAALGGFAHWAYRYLYWGQGTQVTVSS

SEQ ID NO: 37423 - protein, 122 aa, Artificial Sequence
  Chemically Synthesized
QVQLQESGGGLVQAGGSLRLSCAASGNIFTLAYMGWYRQAPGKERELVATIAPGGITYYADSVKGRFTISRDNAKNTVYLQMNSLKPEDTAVYYCAALDRHWSYDPTSHQYWGQGTQVTVSS

SEQ ID NO: 37424 - protein, 118 aa, Artificial Sequence
  Chemically Synthesized
QVQLQESGGGLVQAGGSLRLSCAASGSIFRDWHMGWYRQAPGKEREFVAGIAYGTSTYYADSVKGRFTISRDNAKNTVYLQMNSLKPEDTAVYYCAAIGPHRLGHDYWGQGTQVTVSS

SEQ ID NO: 37425 - protein, 116 aa, Artificial Sequence
  Chemically Synthesized
QVQLQESGGGLVQAGGSLRLSCAASGSISTDNMGWYRQAPGKERELVAGSTNYADSVKGRFTISRDNAKNTVYLQMNSLKPEDTAVYYCAAWIGDVYSDGFSLLYWGQGTQVTVSS

SEQ ID NO: 37426 - protein, 122 aa, Artificial Sequence
  Chemically Synthesized
QVQLQESGGGLVQAGGSLRLSCAASGYISIVYAMGWYRQAPGKEREFVAGIGAGTITNYADSVKGRFTISRDNAKNTVYLQMNSLKPEDTAVYYCAAYVQGRTTAGTYYYYWGQGTQVTVSS

SEQ ID NO: 37427 - protein, 118 aa, Artificial Sequence
  Chemically Synthesized
QVQLQESGGGLVQAGGSLRLSCAASGYIFYDVYMGWYRQAPGKEREFVASIGTGGITYYADSVKGRFTISRDNAKNTVYLQMNSLKPEDTAVYYCAAYYQLDDPYGYWGQGTQVTVSS

SEQ ID NO: 37428 - protein, 119 aa, Artificial Sequence
  Chemically Synthesized
QVQLQESGGGLVQAGGSLRLSCAASGTISYTKDMGWYRQAPGKEREFVATITNGGAITNYADSVKGRFTISRDNAKNTVYLQMNSLKPEDTAVYYCAAVVYVDDDYPYWGQGTQVTVSS

SEQ ID NO: 37429 - protein, 122 aa, Artificial Sequence
  Chemically Synthesized
QVQLQESGGGLVQAGGSLRLSCAASGSIFYRYRMGWYRQAPGKERELVATIGYGTNTNYADSVKGRFTISRDNAKNTVYLQMNSLKPEDTAVYYCAVPLRYRYRPTTGYYYWGQGTQVTVSS

SEQ ID NO: 37430 - protein, 118 aa, Artificial Sequence
  Chemically Synthesized
QVQLQESGGGLVQAGGSLRLSCAASGSISNYTLMGWYRQAPGKEREFVASIDSGGTTNYADSVKGRFTISRDNAKNTVYLQMNSLKPEDTAVYYCAVFYSDGRDHFYWGQGTQVTVSS

SEQ ID NO: 37431 - protein, 118 aa, Artificial Sequence
  Chemically Synthesized
QVQLQESGGGLVQAGGSLRLSCAASGTISGYARMGWYRQAPGKERELVATIDPGSTTNYADSVKGRFTISRDNAKNTVYLQMNSLKPEDTAVYYCAADGFHLRCSCYWGQGTQVTVSS

SEQ ID NO: 37432 - protein, 121 aa, Artificial Sequence
  Chemically Synthesized
QVQLQESGGGLVQAGGSLRLSCAASGTISGIWLMGWYRQAPGKEREFVATINAVLLPYADSVKGRFTISRDNAKNTVYLQMNSLKPEDTAVYYCAVYDRPDYPAKEGYQYWGQGTQVTVSS

SEQ ID NO: 37433 - protein, 118 aa, Artificial Sequence
  Chemically Synthesized
QVQLQESGGGLVQAGGSLRLSCAASGSIFALRSMGWYRQAPGKEREFVAGIGDGGSTYYADSVKGRFTISRDNAKNTVYLQMNSLKPEDTAVYYCAVARTWYYLFDYWGQGTQVTVSS

SEQ ID NO: 37434 - protein, 118 aa, Artificial Sequence
  Chemically Synthesized
QVQLQESGGGLVQAGGSLRLSCAASGYISESDYMGWYRQAPGKEREFVATIAPGTNTYYADSVKGRFTISRDNAKNTVYLQMNSLKPEDTAVYYCAVHYILFRSFTYWGQGTQVTVSS

SEQ ID NO: 37435 - protein, 117 aa, Artificial Sequence
  Chemically Synthesized
QVQLQESGGGLVQAGGSLRLSCAASGTISTGIDMGWYRQAPGKERELVAAITGGTTNYADSVKGRFTISRDNAKNTVYLQMNSLKPEDTAVYYCAVDDSASYYLSYWGQGTQVTVSS

SEQ ID NO: 37436 - protein, 122 aa, Artificial Sequence
  Chemically Synthesized
QVQLQESGGGLVQAGGSLRLSCAASGTISTDLYMGWYRQAPGKEREFVAAITSGSSTNYADSVKGRFTISRDNAKNTVYLQMNSLKPEDTAVYYCAVWYYDTDYYGDPLQYWGQGTQVTVSS

SEQ ID NO: 37437 - protein, 118 aa, Artificial Sequence
  Chemically Synthesized
QVQLQESGGGLVQAGGSLRLSCAASGSISSPYRMGWYRQAPGKERELVAAIDRGAITNYADSVKGRFTISRDNAKNTVYLQMNSLKPEDTAVYYCAAYVTHRAYLLYWGQGTQVTVSS

SEQ ID NO: 37438 - protein, 117 aa, Artificial Sequence
  Chemically Synthesized
QVQLQESGGGLVQAGGSLRLSCAASGYISDQLGMGWYRQAPGKEREFVAGLVTVLVPYADSVKGRFTISRDNAKNTVYLQMNSLKPEDTAVYYCAASNADTTQHAYWGQGTQVTVSS

SEQ ID NO: 37439 - protein, 121 aa, Artificial Sequence
  Chemically Synthesized
QVQLQESGGGLVQAGGSLRLSCAASGSISIQDYMGWYRQAPGKERELVAAIAAGTSTYYADSVKGRFTISRDNAKNTVYLQMNSLKPEDTAVYYCAAVGRGRHWSTTTIYWGQGTQVTVSS

SEQ ID NO: 37440 - protein, 121 aa, Artificial Sequence
  Chemically Synthesized
QVQLQESGGGLVQAGGSLRLSCAASGTIFVTVMGWYRQAPGKEREFVAAITYGANTYYADSVKGRFTISRDNAKNTVYLQMNSLKPEDTAVYYCAAYYEPDGEYYRYHTYWGQGTQVTVSS

SEQ ID NO: 37441 - protein, 118 aa, Artificial Sequence
  Chemically Synthesized
QVQLQESGGGLVQAGGSLRLSCAASGYISAYYVMGWYRQAPGKEREFVASIAWGSSTNYADSVKGRFTISRDNAKNTVYLQMNSLKPEDTAVYYCAAVPYHPSSFLYWGQGTQVTVSS

SEQ ID NO: 37442 - protein, 118 aa, Artificial Sequence
  Chemically Synthesized
QVQLQESGGGLVQAGGSLRLSCAASGTIFVYFVMGWYRQAPGKEREFVATIANGTNTNYADSVKGRFTISRDNAKNTVYLQMNSLKPEDTAVYYCAVTPSYNLGHSYWGQGTQVTVSS

SEQ ID NO: 37443 - protein, 118 aa, Artificial Sequence
  Chemically Synthesized
QVQLQESGGGLVQAGGSLRLSCAASGNIFAFSWMGWYRQAPGKEREFVATINGGGNTNYADSVKGRFTISRDNAKNTVYLQMNSLKPEDTAVYYCAATAKYEYPYGYWGQGTQVTVSS

SEQ ID NO: 37444 - protein, 122 aa, Artificial Sequence
  Chemically Synthesized
QVQLQESGGGLVQAGGSLRLSCAASGTISDIIVMGWYRQAPGKEREFVASITEGGNTNYADSVKGRFTISRDNAKNTVYLQMNSLKPEDTAVYYCAVWLGTLPDSRGPYTYWGQGTQVTVSS

SEQ ID NO: 37445 - protein, 122 aa, Artificial Sequence
  Chemically Synthesized
QVQLQESGGGLVQAGGSLRLSCAASGSISSGLLMGWYRQAPGKEREFVATINYGGTTYYADSVKGRFTISRDNAKNTVYLQMNSLKPEDTAVYYCAVYGAYRYRGTGRYDYWGQGTQVTVSS

SEQ ID NO: 37446 - protein, 121 aa, Artificial Sequence
  Chemically Synthesized
QVQLQESGGGLVQAGGSLRLSCAASGSISAHNAMGWYRQAPGKEREFVATISYGANTNYADSVKGRFTISRDNAKNTVYLQMNSLKPEDTAVYYCAAGRLSLSTTVTCMYWGQGTQVTVSS

SEQ ID NO: 37447 - protein, 118 aa, Artificial Sequence
  Chemically Synthesized
QVQLQESGGGLVQAGGSLRLSCAASGNISTDHTMGWYRQAPGKERELVATISTGATTNYADSVKGRFTISRDNAKNTVYLQMNSLKPEDTAVYYCAVQIYDADSHQYWGQGTQVTVSS

SEQ ID NO: 37448 - protein, 124 aa, Artificial Sequence
  Chemically Synthesized
QVQLQESGGGLVQAGGSLRLSCAASGTIFQYGYMGWYRQAPGKERELVATIDGGGNTYADSVKGRFTISRDNAKNTVYLQMNSLKPEDTAVYYCAVDGGSRDHDDYMTNRCIYWGQGTQVTVSS

SEQ ID NO: 37449 - protein, 121 aa, Artificial Sequence
  Chemically Synthesized
QVQLQESGGGLVQAGGSLRLSCAASGSIFWGDVMGWYRQAPGKEREFVAAIAAGAITYYADSVKGRFTISRDNAKNTVYLQMNSLKPEDTAVYYCAVYGDGKDGSCVLIYWGQGTQVTVSS

SEQ ID NO: 37450 - protein, 116 aa, Artificial Sequence
  Chemically Synthesized
QVQLQESGGGLVQAGGSLRLSCAASGSMGWYRQAPGKEREFVAGINLGANTNYADSVKGRFTISRDNAKNTVYLQMNSLKPEDTAVYYCAAQVAGTYVRYSQFAYWGQGTQVTVSS

SEQ ID NO: 37451 - protein, 126 aa, Artificial Sequence
  Chemically Synthesized
QVQLQESGGGLVQAGGSLRLSCAASGNIFSTPKMGWYRQAPGKERELVAAIDVGGITNYADSVKGRFTISRDNAKNTVYLQMNSLKPEDTAVYYCAAYDNYYDSHRTDFYWYYYYWGQGTQVTVSS

SEQ ID NO: 37452 - protein, 117 aa, Artificial Sequence
  Chemically Synthesized
QVQLQESGGGLVQAGGSLRLSCAASGSISLRQYMGWYRQAPGKEREFVAVLLTVVVPYADSVKGRFTISRDNAKNTVYLQMNSLKPEDTAVYYCAVWDPRRTIHNYWGQGTQVTVSS

SEQ ID NO: 37453 - protein, 118 aa, Artificial Sequence
  Chemically Synthesized
QVQLQESGGGLVQAGGSLRLSCAASGSISRLVGMGWYRQAPGKERELVAAISGGATTYYADSVKGRFTISRDNAKNTVYLQMNSLKPEDTAVYYCAVRGDFQDIYRYWGQGTQVTVSS

SEQ ID NO: 37454 - protein, 117 aa, Artificial Sequence
  Chemically Synthesized
QVQLQESGGGLVQAGGSLRLSCAASGNFLGVTMGWYRQAPGKERELVATIAFGGSTNYADSVKGRFTISRDNAKNTVYLQMNSLKPEDTAVYYCAVPDVYYDPHYYWGQGTQVTVSS

SEQ ID NO: 37455 - protein, 125 aa, Artificial Sequence
  Chemically Synthesized
QVQLQESGGGLVQAGGSLRLSCAASGTISCSTMGWYRQAPGKEREFVASIGDGTITNYADSVKGRFTISRDNAKNTVYLQMNSLKPEDTAVYYCAVPFNSEQPYYDTSGAWYWYWGQGTQVTVSS

SEQ ID NO: 37456 - protein, 118 aa, Artificial Sequence
  Chemically Synthesized
QVQLQESGGGLVQAGGSLRLSCAASGTISYYYYMGWYRQAPGKEREFVAGIGYGTSTYYADSVKGRFTISRDNAKNTVYLQMNSLKPEDTAVYYCAVSRRWGPVLPYWGQGTQVTVSS

SEQ ID NO: 37457 - protein, 118 aa, Artificial Sequence
  Chemically Synthesized
QVQLQESGGGLVQAGGSLRLSCAASGSIFPLVVMGWYRQAPGKERELVASIGYGSSTYYADSVKGRFTISRDNAKNTVYLQMNSLKPEDTAVYYCAAEQNGNRPFYYWGQGTQVTVSS

SEQ ID NO: 37458 - protein, 118 aa, Artificial Sequence
  Chemically Synthesized
QVQLQESGGGLVQAGGSLRLSCAASGTIFEVPQMGWYRQAPGKEREFVAGIAEGSSTNYADSVKGRFTISRDNAKNTVYLQMNSLKPEDTAVYYCAVKYAYTQRYWYWGQGTQVTVSS

SEQ ID NO: 37459 - protein, 126 aa, Artificial Sequence
  Chemically Synthesized
QVQLQESGGGLVQAGGSLRLSCAASGTIFIPTWMGWYRQAPGKERELVASIAGGSNTKYADSVKGRFTISRDNAKNTVYLQMNSLKPEDTAVYYCAASRHTYYKGSEYLVQPLLYWGQGTQVTVSS

SEQ ID NO: 37460 - protein, 118 aa, Artificial Sequence
  Chemically Synthesized
QVQLQESGGGLVQAGGSLRLSCAASGNISDDSNMGWYRQAPGKERELVAAIGGGATTNYADSVKGRFTISRDNAKNTVYLQMNSLKPEDTAVYYCAATYPELADHSYWGQGTQVTVSS

SEQ ID NO: 37461 - protein, 122 aa, Artificial Sequence
  Chemically Synthesized
QVQLQESGGGLVQAGGSLRLSCAASGTIFIVSDMGWYRQAPGKERELVATIDFGSITNYADSVKGRFTISRDNAKNTVYLQMNSLKPEDTAVYYCAAILYQGRGYDYAFYYWGQGTQVTVSS

SEQ ID NO: 37462 - protein, 118 aa, Artificial Sequence
  Chemically Synthesized
QVQLQESGGGLVQAGGSLRLSCAASGSISHNSSMGWYRQAPGKEREFVATISYGAITNYADSVKGRFTISRDNAKNTVYLQMNSLKPEDTAVYYCAVYGGDYVEHEYWGQGTQVTVSS

SEQ ID NO: 37463 - protein, 116 aa, Artificial Sequence
  Chemically Synthesized
QVQLQESGGGLVQAGGSLRLSCAASGTIFVWLMGWYRQAPGKEREFVPLLLGVVIPYADSVKGRFTISRDNAKNTVYLQMNSLKPEDTAVYYCAVYTDALDGYRYWGQGTQVTVSS

SEQ ID NO: 37464 - protein, 118 aa, Artificial Sequence
  Chemically Synthesized
QVQLQESGGGLVQAGGSLRLSCAASGTISSGDAMGWYRQAPGKEREFVASIAYGASTNYADSVKGRFTISRDNAKNTVYLQMNSLKPEDTAVYYCAAGEDHGRQFTYWGQGTQVTVSS

SEQ ID NO: 37465 - protein, 122 aa, Artificial Sequence
  Chemically Synthesized
QVQLQESGGGLVQAGGSLRLSCAASGYISEDETMGWYRQAPGKERELVAGIGSGTSTNYADSVKGRFTISRDNAKNTVYLQMNSLKPEDTAVYYCAADSPFFPTYTIVYPYWGQGTQVTVSS

SEQ ID NO: 37466 - protein, 117 aa, Artificial Sequence
  Chemically Synthesized
QVQLQESGGGLVQAGGSLRLSCAASGSIFDDSYMGWYRQAPGKEREFVAAIDDGSNTYADSVKGRFTISRDNAKNTVYLQMNSLKPEDTAVYYCAAYLWRVEVLSYWGQGTQVTVSS

SEQ ID NO: 37467 - protein, 118 aa, Artificial Sequence
  Chemically Synthesized
QVQLQESGGGLVQAGGSLRLSCAASGTISWWTAMGWYRQAPGKERELVAAISNGGNTYYADSVKGRFTISRDNAKNTVYLQMNSLKPEDTAVYYCAVLHPGYGNHGYWGQGTQVTVSS

SEQ ID NO: 37468 - protein, 126 aa, Artificial Sequence
  Chemically Synthesized
QVQLQESGGGLVQAGGSLRLSCAASGNISYSDDMGWYRQAPGKEREFVASIGYGGSTYYADSVKGRFTISRDNAKNTVYLQMNSLKPEDTAVYYCAVRDTARKKDWYEYRTWFDYWGQGTQVTVSS

SEQ ID NO: 37469 - protein, 126 aa, Artificial Sequence
  Chemically Synthesized
QVQLQESGGGLVQAGGSLRLSCAASGNIFTRPYMGWYRQAPGKERELVAAIDYGATTNYADSVKGRFTISRDNAKNTVYLQMNSLKPEDTAVYYCAAPRRYSSLLGFYYVGNHAYWGQGTQVTVSS

SEQ ID NO: 37470 - protein, 118 aa, Artificial Sequence
  Chemically Synthesized
QVQLQESGGGLVQAGGSLRLSCAASGYIFNFYQMGWYRQAPGKEREFVATITVGTTTNYADSVKGRFTISRDNAKNTVYLQMNSLKPEDTAVYYCAVDPLRTEHHEYWGQGTQVTVSS

SEQ ID NO: 37471 - protein, 122 aa, Artificial Sequence
  Chemically Synthesized
QVQLQESGGGLVQAGGSLRLSCAASGTIFDTDNMGWYRQAPGKEREFVASIGTGTSTYYADSVKGRFTISRDNAKNTVYLQMNSLKPEDTAVYYCAASAVYDGPYFDPLGYWGQGTQVTVSS

SEQ ID NO: 37472 - protein, 126 aa, Artificial Sequence
  Chemically Synthesized
QVQLQESGGGLVQAGGSLRLSCAASGNISAGIFMGWYRQAPGKERELVASISDGTSTNYADSVKGRFTISRDNAKNTVYLQMNSLKPEDTAVYYCAAGLGLSYDHQVYGQSAYEYWGQGTQVTVSS

SEQ ID NO: 37473 - protein, 118 aa, Artificial Sequence
  Chemically Synthesized
QVQLQESGGGLVQAGGSLRLSCAASGNISWDNYMGWYRQAPGKERELVATINEGSNTNYADSVKGRFTISRDNAKNTVYLQMNSLKPEDTAVYYCAAGYDGAIYFPYWGQGTQVTVSS

SEQ ID NO: 37474 - protein, 110 aa, Artificial Sequence
  Chemically Synthesized
QVQLQESGGGLVQAGGSLRLSCAASGNIFGPYTMGWYRQAPGKEREFVASITAGTTTNYADSVKGRFTISRDNAKNTVYLQMNSLKPEDTAVYYCAHLYWGQGTQVTVSS

SEQ ID NO: 37475 - protein, 122 aa, Artificial Sequence
  Chemically Synthesized
QVQLQESGGGLVQAGGSLRLSCAASGTISGPPVMGWYRQAPGKERELVAAIGFGSTTYYADSVKGRFTISRDNAKNTVYLQMNSLKPEDTAVYYCAAPHRYLTGVRAPYRYWGQGTQVTVSS

SEQ ID NO: 37476 - protein, 112 aa, Artificial Sequence
  Chemically Synthesized
QVQLQESGGGLVQAGGSLRLSCAASGTISDATKMGWYRQAPGKERELVASISPGSTTYYADSVKGRFTISRDNAKNTVYLQMNSLKPEDTAVYYCAARHVYWGQGTQVTVSS

SEQ ID NO: 37477 - protein, 122 aa, Artificial Sequence
  Chemically Synthesized
QVQLQESGGGLVQAGGSLRLSCAASGSISYWYYMGWYRQAPGKEREFVATITLGTITNYADSVKGRFTISRDNAKNTVYLQMNSLKPEDTAVYYCAADSADESDDQYEHVYWGQGTQVTVSS

SEQ ID NO: 37478 - protein, 112 aa, Artificial Sequence
  Chemically Synthesized
QVQLQESGGGLVQAGGSLRLSCAASGNIFSDYDMGWYRQAPGKERELVAGIAYGTITNYADSVKGRFTISRDNAKNTVYLQMNSLKPEDTAVYYCAVSGVYWGQGTQVTVSS

SEQ ID NO: 37479 - protein, 110 aa, Artificial Sequence
  Chemically Synthesized
QVQLQESGGGLVQAGGSLRLSCAASGTIFGALLMGWYRQAPGKERELVASIGAGTTTNYADSVKGRFTISRDNAKNTVYLQMNSLKPEDTAVYYCAVSYWGQGTQVTVSS

SEQ ID NO: 37480 - protein, 118 aa, Artificial Sequence
  Chemically Synthesized
QVQLQESGGGLVQAGGSLRLSCAASGTIFDGVAMGWYRQAPGKERELVASISQGSSNQYADSVKGRFTISRDNAKNTVYLQMNSLKPEDTAVYYCAATASVNYRHDYWGQGTQVTVSS

SEQ ID NO: 37481 - protein, 121 aa, Artificial Sequence
  Chemically Synthesized
QVQLQESGGGLVQAGGSLRLSCAASGYIFFVHMGWYRQAPGKEREFVASISHGTTTNYADSVKGRFTISRDNAKNTVYLQMNSLKPEDTAVYYCAAQYGPYYGRYYLHTYWGQGTQVTVSS

SEQ ID NO: 37482 - protein, 117 aa, Artificial Sequence
  Chemically Synthesized
QVQLQESGGGLVQAGGSLRLSCAASGYISTQGGMGWYRQAPGKEREFVAAITYGGTTNYADSVKGRFTISRDNAKNTVYLQMNSLKPEDTAVYYCAVIGSVSTLFYWGQGTQVTVSS

SEQ ID NO: 37483 - protein, 120 aa, Artificial Sequence
  Chemically Synthesized
QVQLQESGGGLVQAGGSLRLSCAASGTISLSMGWYRQAPGKERELVATITEGGNTYYADSVKGRFTISRDNAKNTVYLQMNSLKPEDTAVYYCAVYGYFYLWQYYDHSYWGQGTQVTVSS

SEQ ID NO: 37484 - protein, 121 aa, Artificial Sequence
  Chemically Synthesized
QVQLQESGGGLVQAGGSLRLSCAASGYISDNSMGWYRQAPGKEREFVATIDSGTTTNYADSVKGRFTISRDNAKNTVYLQMNSLKPEDTAVYYCAVYDTRTRGYPDFLEYWGQGTQVTVSS

SEQ ID NO: 37485 - protein, 122 aa, Artificial Sequence
  Chemically Synthesized
QVQLQESGGGLVQAGGSLRLSCAASGSISYHTVMGWYRQAPGKEREFVASINHGSSTLYADSVKGRFTISRDNAKNTVYLQMNSLKPEDTAVYYCAVGYDYDHYYDQYLYYWGQGTQVTVSS

SEQ ID NO: 37486 - protein, 118 aa, Artificial Sequence
  Chemically Synthesized
QVQLQESGGGLVQAGGSLRLSCAASGYISGTTVMGWYRQAPGKEREFVAGIAVGGNTYYADSVKGRFTISRDNAKNTVYLQMNSLKPEDTAVYYCAAVGHYFWDHQYWGQGTQVTVSS

SEQ ID NO: 37487 - protein, 122 aa, Artificial Sequence
  Chemically Synthesized
QVQLQESGGGLVQAGGSLRLSCAASGTISDAGNMGWYRQAPGKERELVAGISDGATTNYADSVKGRFTISRDNAKNTVYLQMNSLKPEDTAVYYCAAFGYDWAYQGGYLLYWGQGTQVTVSS

SEQ ID NO: 37488 - protein, 118 aa, Artificial Sequence
  Chemically Synthesized
QVQLQESGGGLVQAGGSLRLSCAASGYIFSDNPMGWYRQAPGKERELVAGIGRGATTYYADSVKGRFTISRDNAKNTVYLQMNSLKPEDTAVYYCAVPPLLIQLHWYWGQGTQVTVSS

SEQ ID NO: 37489 - protein, 126 aa, Artificial Sequence
  Chemically Synthesized
QVQLQESGGGLVQAGGSLRLSCAASGSISGDRGMGWYRQAPGKEREFVATIDEGTTTNYADSVKGRFTISRDNAKNTVYLQMNSLKPEDTAVYYCAAQYSSILHQAEYETDDLLYWGQGTQVTVSS

SEQ ID NO: 37490 - protein, 116 aa, Artificial Sequence
  Chemically Synthesized
QVQLQESGGGLVQAGGSLRLSCAASGYCSCLMGWYRQAPGKEREFVAAIGIGTSTYYADSVKGRFTISRDNAKNTVYLQMNSLKPEDTAVYYCAAYAKTPPSYPYWGQGTQVTVSS

SEQ ID NO: 37491 - protein, 121 aa, Artificial Sequence
  Chemically Synthesized
QVQLQESGGGLVQAGGSLRLSCAASGSISGQRDMGWYRQAPGKEREFVASIDEGTTTNYADSVKGRFTISRDNAKNTVYLQMNSLKPEDTAVYYCAAYNAGAVTCTTNLYWGQGTQVTVSS

SEQ ID NO: 37492 - protein, 118 aa, Artificial Sequence
  Chemically Synthesized
QVQLQESGGGLVQAGGSLRLSCAASGTIFYTRDMGWYRQAPGKERELVATIGNGGTTYYADSVKGRFTISRDNAKNTVYLQMNSLKPEDTAVYYCAVYVLCWGIHYYWGQGTQVTVSS

SEQ ID NO: 37493 - protein, 122 aa, Artificial Sequence
  Chemically Synthesized
QVQLQESGGGLVQAGGSLRLSCAASGNIFRSDTMGWYRQAPGKERELVATIDVGTITNYADSVKGRFTISRDNAKNTVYLQMNSLKPEDTAVYYCAVYVHHSYPTFGSHEYWGQGTQVTVSS

SEQ ID NO: 37494 - protein, 126 aa, Artificial Sequence
  Chemically Synthesized
QVQLQESGGGLVQAGGSLRLSCAASGYISYPVWMGWYRQAPGKERELVASIDGGSSTNYADSVKGRFTISRDNAKNTVYLQMNSLKPEDTAVYYCAAYDDWQLTQSTDTYIYLRYWGQGTQVTVSS

SEQ ID NO: 37495 - protein, 117 aa, Artificial Sequence
  Chemically Synthesized
QVQLQESGGGLVQAGGSLRLSCAASGTISNRNSMGWYRQAPGKERELVASISPGANTNYADSVKGRFTISRDNAKNTVYLQMNSLKPEDTAVYYCAAEEVTKSVLYWGQGTQVTVSS

SEQ ID NO: 37496 - protein, 124 aa, Artificial Sequence
  Chemically Synthesized
QVQLQESGGGLVQAGGSLRLSCAASGNISDAYTMGWYRQAPGKEREFVATITSGATTNYADSVKGRFTISRDNAKNTVYLQMNSLKPEDTAVYYCAAPARKDGGIYYRTWLWYWGQGTQVTVSS

SEQ ID NO: 37497 - protein, 118 aa, Artificial Sequence
  Chemically Synthesized
QVQLQESGGGLVQAGGSLRLSCAASGTISHAFWMGWYRQAPGKERELVAGIARGGTTNYADSVKGRFTISRDNAKNTVYLQMNSLKPEDTAVYYCAAADYEQDGHNYWGQGTQVTVSS

SEQ ID NO: 37498 - protein, 117 aa, Artificial Sequence
  Chemically Synthesized
QVQLQESGGGLVQAGGSLRLSCAASGSISDVEMGWYRQAPGKERELVAGIGYGSNTNYADSVKGRFTISRDNAKNTVYLQMNSLKPEDTAVYYCAVDYDSSPALRYWGQGTQVTVSS

SEQ ID NO: 37499 - protein, 118 aa, Artificial Sequence
  Chemically Synthesized
QVQLQESGGGLVQAGGSLRLSCAASGSISHGLLMGWYRQAPGKEREFVASISIGGNTNYADSVKGRFTISRDNAKNTVYLQMNSLKPEDTAVYYCAVDQRQPTYYRYWGQGTQVTVSS

SEQ ID NO: 37500 - protein, 118 aa, Artificial Sequence
  Chemically Synthesized
QVQLQESGGGLVQAGGSLRLSCAASGTISIDVPMGWYRQAPGKERELVATISDGTSTYYADSVKGRFTISRDNAKNTVYLQMNSLKPEDTAVYYCAAFKTETYDYDYWGQGTQVTVSS

SEQ ID NO: 37501 - protein, 118 aa, Artificial Sequence
  Chemically Synthesized
QVQLQESGGGLVQAGGSLRLSCAASGNISDRVSMGWYRQAPGKEREFVATINSGASTYYADSVKGRFTISRDNAKNTVYLQMNSLKPEDTAVYYCAAPGGVPYVHDYWGQGTQVTVSS

SEQ ID NO: 37502 - protein, 114 aa, Artificial Sequence
  Chemically Synthesized
QVQLQESGGGLVQAGGSLRLSCAASGSISTWNLMGWYRQAPGKEREFVAGVLVPYADSVKGRFTISRDNAKNTVYLQMNSLKPEDTAVYYCAAFHARWSILLYWGQGTQVTVSS

SEQ ID NO: 37503 - protein, 118 aa, Artificial Sequence
  Chemically Synthesized
QVQLQESGGGLVQAGGSLRLSCAASGYISGGRYMGWYRQAPGKERELVASISYGTSTYYADSVKGRFTISRDNAKNTVYLQMNSLKPEDTAVYYCAAYASPNGGFPYWGQGTQVTVSS

SEQ ID NO: 37504 - protein, 118 aa, Artificial Sequence
  Chemically Synthesized
QVQLQESGGGLVQAGGSLRLSCAASGSISYAPVMGWYRQAPGKEREFVATIGVGTTTYYADSVKGRFTISRDNAKNTVYLQMNSLKPEDTAVYYCAVWYRYWYRHNYWGQGTQVTVSS

SEQ ID NO: 37505 - protein, 118 aa, Artificial Sequence
  Chemically Synthesized
QVQLQESGGGLVQAGGSLRLSCAASGYISGLYWMGWYRQAPGKEREFVASITDGATTNYADSVKGRFTISRDNAKNTVYLQMNSLKPEDTAVYYCAVYGLWVLQLKYWGQGTQVTVSS

SEQ ID NO: 37506 - protein, 122 aa, Artificial Sequence
  Chemically Synthesized
QVQLQESGGGLVQAGGSLRLSCAASGSIFAYGTMGWYRQAPGKERELVATIDDGGNTYYADSVKGRFTISRDNAKNTVYLQMNSLKPEDTAVYYCAADDGLPGDYNDGHRYWGQGTQVTVSS

SEQ ID NO: 37507 - protein, 122 aa, Artificial Sequence
  Chemically Synthesized
QVQLQESGGGLVQAGGSLRLSCAASGNISDRTAMGWYRQAPGKEREFVASISAGGTTNYADSVKGRFTISRDNAKNTVYLQMNSLKPEDTAVYYCAVYYEVDTYEYLLLAYWGQGTQVTVSS

SEQ ID NO: 37508 - protein, 122 aa, Artificial Sequence
  Chemically Synthesized
QVQLQESGGGLVQAGGSLRLSCAASGNIFDARYMGWYRQAPGKEREFVASISDGASTYYADSVKGRFTISRDNAKNTVYLQMNSLKPEDTAVYYCAVRYELPDAYTNEYGYWGQGTQVTVSS

SEQ ID NO: 37509 - protein, 124 aa, Artificial Sequence
  Chemically Synthesized
QVQLQESGGGLVQAGGSLRLSCAASGSIFDGGDMGWYRQAPGKEREFVAGIAYGGSTNYADSVKGRFTISRDNAKNTVYLQMNSLKPEDTAVYYCAAGWLIDDARVTYRDHGYWGQGTQVTVSS

SEQ ID NO: 37510 - protein, 125 aa, Artificial Sequence
  Chemically Synthesized
QVQLQESGGGLVQAGGSLRLSCAASGTIFTHYPMGWYRQAPGKEREFVAAIATGGNTNYADSVKGRFTISRDNAKNTVYLQMNSLKPEDTAVYYCAAPVRYFIPPLIVIAHHDYWGQGTQVTVSS

SEQ ID NO: 37511 - protein, 126 aa, Artificial Sequence
  Chemically Synthesized
QVQLQESGGGLVQAGGSLRLSCAASGYISGFDRMGWYRQAPGKERELVATIGYGGNTYYADSVKGRFTISRDNAKNTVYLQMNSLKPEDTAVYYCAAGYVDYDVQYRGGEYRHYYWGQGTQVTVSS

SEQ ID NO: 37512 - protein, 122 aa, Artificial Sequence
  Chemically Synthesized
QVQLQESGGGLVQAGGSLRLSCAASGTISLPYVMGWYRQAPGKEREFVASIGDGTSTYYADSVKGRFTISRDNAKNTVYLQMNSLKPEDTAVYYCAVDYAGTTSTAPYLPYWGQGTQVTVSS

SEQ ID NO: 37513 - protein, 122 aa, Artificial Sequence
  Chemically Synthesized
QVQLQESGGGLVQAGGSLRLSCAASGTISRTWYMGWYRQAPGKEREFVASITLGSITYYADSVKGRFTISRDNAKNTVYLQMNSLKPEDTAVYYCAAQYYGIGTYWYTYHYWGQGTQVTVSS

SEQ ID NO: 37514 - protein, 120 aa, Artificial Sequence
  Chemically Synthesized
QVQLQESGGGLVQAGGSLRLSCAASGSISSQTMGWYRQAPGKERELVAAINYGGNTNYADSVKGRFTISRDNAKNTVYLQMNSLKPEDTAVYYCAADEDDYPRYYDHTYWGQGTQVTVSS

SEQ ID NO: 37515 - protein, 117 aa, Artificial Sequence
  Chemically Synthesized
QVQLQESGGGLVQAGGSLRLSCAASGSIFTVTMGWYRQAPGKERELVATIGLGSTTNYADSVKGRFTISRDNAKNTVYLQMNSLKPEDTAVYYCAAGGLVQVALNYWGQGTQVTVSS

SEQ ID NO: 37516 - protein, 117 aa, Artificial Sequence
  Chemically Synthesized
QVQLQESGGGLVQAGGSLRLSCAASGYIFQETMGWYRQAPGKERELVAAIAKGGNTYYADSVKGRFTISRDNAKNTVYLQMNSLKPEDTAVYYCAADYYDADILDYWGQGTQVTVSS

SEQ ID NO: 37517 - protein, 118 aa, Artificial Sequence
  Chemically Synthesized
QVQLQESGGGLVQAGGSLRLSCAASGTISVVYVMGWYRQAPGKERELVASIDYGGSTNYADSVKGRFTISRDNAKNTVYLQMNSLKPEDTAVYYCAVIVPIYRPHYYWGQGTQVTVSS

SEQ ID NO: 37518 - protein, 118 aa, Artificial Sequence
  Chemically Synthesized
QVQLQESGGGLVQAGGSLRLSCAASGTISGYAWMGWYRQAPGKERELVASINTGSNTNYADSVKGRFTISRDNAKNTVYLQMNSLKPEDTAVYYCAVDNVYYKLLHYWGQGTQVTVSS

SEQ ID NO: 37519 - protein, 125 aa, Artificial Sequence
  Chemically Synthesized
QVQLQESGGGLVQAGGSLRLSCAASGNISTYRTMGWYRQAPGKERELVASINYGTITYYADSVKGRFTISRDNAKNTVYLQMNSLKPEDTAVYYCAADGVTVSTVRSSNTKSIYWGQGTQVTVSS

SEQ ID NO: 37520 - protein, 122 aa, Artificial Sequence
  Chemically Synthesized
QVQLQESGGGLVQAGGSLRLSCAASGNIFFRKYMGWYRQAPGKEREFVAGIGYGATTYYADSVKGRFTISRDNAKNTVYLQMNSLKPEDTAVYYCAATIFYVYDVAGHHVYWGQGTQVTVSS

SEQ ID NO: 37521 - protein, 118 aa, Artificial Sequence
  Chemically Synthesized
QVQLQESGGGLVQAGGSLRLSCAASGNISSNAIMGWYRQAPGKERELVAAIDVGASTNYADSVKGRFTISRDNAKNTVYLQMNSLKPEDTAVYYCAVAFLRGGYHGYWGQGTQVTVSS

SEQ ID NO: 37522 - protein, 119 aa, Artificial Sequence
  Chemically Synthesized
QVQLQESGGGLVQAGGSLRLSCAASGYIFSGKPMGWYRQAPGKERELVASINYGANTNYADSVKGRFTISRDNAKNTVYLQMNSLKPEDTAVYYCAVPWRAVDADYRYWGQGTQVTVSS

SEQ ID NO: 37523 - protein, 118 aa, Artificial Sequence
  Chemically Synthesized
QVQLQESGGGLVQAGGSLRLSCAASGYISGYYTMGWYRQAPGKEREFVAGISSGGNTYYADSVKGRFTISRDNAKNTVYLQMNSLKPEDTAVYYCAANLATYIPHGYWGQGTQVTVSS

SEQ ID NO: 37524 - protein, 118 aa, Artificial Sequence
  Chemically Synthesized
QVQLQESGGGLVQAGGSLRLSCAASGNISYGRGMGWYRQAPGKERELVATIDGGGTTNYADSVKGRFTISRDNAKNTVYLQMNSLKPEDTAVYYCAAGWYDYWRYRYWGQGTQVTVSS

SEQ ID NO: 37525 - protein, 118 aa, Artificial Sequence
  Chemically Synthesized
QVQLQESGGGLVQAGGSLRLSCAASGNIFHYFDMGWYRQAPGKEREFVAAIDPGASTYYADSVKGRFTISRDNAKNTVYLQMNSLKPEDTAVYYCAVYRYFDWTYDYWGQGTQVTVSS

SEQ ID NO: 37526 - protein, 118 aa, Artificial Sequence
  Chemically Synthesized
QVQLQESGGGLVQAGGSLRLSCAASGTIFGFPDMGWYRQAPGKEREFVATIDLGTTTYYADSVKGRFTISRDNAKNTVYLQMNSLKPEDTAVYYCAADDTGVGLYYYWGQGTQVTVSS

SEQ ID NO: 37527 - protein, 109 aa, Artificial Sequence
  Chemically Synthesized
QVQLQESGGGLVQAGGSLRLSCAASGYISLDKRMGWYRQAPGKERELVASIDPGGITNYADSVKGRFTISRDNAKNTVYLQMNSLKPEDTAVYYCAVYWGQGTQVTVSS

SEQ ID NO: 37528 - protein, 117 aa, Artificial Sequence
  Chemically Synthesized
QVQLQESGGGLVQAGGSLRLSCAASGTISRKSMGWYRQAPGKEREFVAAIGYGTNTYYADSVKGRFTISRDNAKNTVYLQMNSLKPEDTAVYYCAADGAEPVYFPYWGQGTQVTVSS

SEQ ID NO: 37529 - protein, 111 aa, Artificial Sequence
  Chemically Synthesized
QVQLQESGGGLVQAGGSLRLSCAASGNIFVSDFMGWYRQAPGKERELVAGIAYGSITNYADSVKGRFTISRDNAKNTVYLQMNSLKPEDTAVYYCAAHPYWGQGTQVTVSS

SEQ ID NO: 37530 - protein, 125 aa, Artificial Sequence
  Chemically Synthesized
QVQLQESGGGLVQAGGSLRLSCAASGTISGRGDMGWYRQAPGKEREFVPVLIRVLLPYADSVKGRFTISRDNAKNTVYLQMNSLKPEDTAVYYCAAYYDQGAQPELPWYGYYWYWGQGTQVTVSS

SEQ ID NO: 37531 - protein, 118 aa, Artificial Sequence
  Chemically Synthesized
QVQLQESGGGLVQAGGSLRLSCAASGTISPTDDMGWYRQAPGKERELVASINDGTITNYADSVKGRFTISRDNAKNTVYLQMNSLKPEDTAVYYCAALGFQYFEFVYWGQGTQVTVSS

SEQ ID NO: 37532 - protein, 126 aa, Artificial Sequence
  Chemically Synthesized
QVQLQESGGGLVQAGGSLRLSCAASGYISYSRYMGWYRQAPGKEREFVATIAVGANTYYADSVKGRFTISRDNAKNTVYLQMNSLKPEDTAVYYCAAYRYLTRRGKQSEVSYFGYWGQGTQVTVSS

SEQ ID NO: 37533 - protein, 121 aa, Artificial Sequence
  Chemically Synthesized
QVQLQESGGGLVQAGGSLRLSCAASGNISRHFYMGWYRQAPGKEREFVAGITGGGNTYYADSVKGRFTISRDNAKNTVYLQMNSLKPEDTAVYYCAAKGSLFRGWYGLDYWGQGTQVTVSS

SEQ ID NO: 37534 - protein, 122 aa, Artificial Sequence
  Chemically Synthesized
QVQLQESGGGLVQAGGSLRLSCAASGNIFRWIGMGWYRQAPGKERELVATIDGGGITYYADSVKGRFTISRDNAKNTVYLQMNSLKPEDTAVYYCAANEWYSERDTRVHGYWGQGTQVTVSS

SEQ ID NO: 37535 - protein, 126 aa, Artificial Sequence
  Chemically Synthesized
QVQLQESGGGLVQAGGSLRLSCAASGNISRYISMGWYRQAPGKEREFVATIADGASTYYADSVKGRFTISRDNAKNTVYLQMNSLKPEDTAVYYCAAVFQVHLGYTGDNPGLHDYWGQGTQVTVSS

SEQ ID NO: 37536 - protein, 117 aa, Artificial Sequence
  Chemically Synthesized
QVQLQESGGGLVQAGGSLRLSCAASGNISYSFDMGWYRQAPGKEREFVAGIDLGSITNYADSVKGRFTISRDNAKNTVYLQMNSLKPEDTAVYYCAVGPYWAAFQYWGQGTQVTVSS

SEQ ID NO: 37537 - protein, 118 aa, Artificial Sequence
  Chemically Synthesized
QVQLQESGGGLVQAGGSLRLSCAASGTIFFYYVMGWYRQAPGKEREFVAGISGGGNTYYADSVKGRFTISRDNAKNTVYLQMNSLKPEDTAVYYCAVLADLRAPFGYWGQGTQVTVSS

SEQ ID NO: 37538 - protein, 118 aa, Artificial Sequence
  Chemically Synthesized
QVQLQESGGGLVQAGGSLRLSCAASGNIFTRGDMGWYRQAPGKEREFVAAIGSGGITYYADSVKGRFTISRDNAKNTVYLQMNSLKPEDTAVYYCAAGFLSYYLLAYWGQGTQVTVSS

SEQ ID NO: 37539 - protein, 118 aa, Artificial Sequence
  Chemically Synthesized
QVQLQESGGGLVQAGGSLRLSCAASGYIFYRPFMGWYRQAPGKERELVASINVGGNTYYADSVKGRFTISRDNAKNTVYLQMNSLKPEDTAVYYCAVYFDVYGGFVYWGQGTQVTVSS

SEQ ID NO: 37540 - protein, 118 aa, Artificial Sequence
  Chemically Synthesized
QVQLQESGGGLVQAGGSLRLSCAASGTISVILGMGWYRQAPGKERELVAAITYGTSTNYADSVKGRFTISRDNAKNTVYLQMNSLKPEDTAVYYCAADISGTWALAYWGQGTQVTVSS

SEQ ID NO: 37541 - protein, 118 aa, Artificial Sequence
  Chemically Synthesized
QVQLQESGGGLVQAGGSLRLSCAASGYIFDYSNMGWYRQAPGKEREFVATIGAGGTTYYADSVKGRFTISRDNAKNTVYLQMNSLKPEDTAVYYCAAWFGKYPYLAYWGQGTQVTVSS

SEQ ID NO: 37542 - protein, 121 aa, Artificial Sequence
  Chemically Synthesized
QVQLQESGGGLVQAGGSLRLSCAASGIFLWVVMGWYRQAPGKEREFVAGISTGASTNYADSVKGRFTISRDNAKNTVYLQMNSLKPEDTAVYYCAVIRRDYDGAIVPYFYWGQGTQVTVSS

SEQ ID NO: 37543 - protein, 122 aa, Artificial Sequence
  Chemically Synthesized
QVQLQESGGGLVQAGGSLRLSCAASGNISDVWAMGWYRQAPGKEREFVAGIASGSTTNYADSVKGRFTISRDNAKNTVYLQMNSLKPEDTAVYYCAAYTAQTTYYGGDYVYWGQGTQVTVSS

SEQ ID NO: 37544 - protein, 117 aa, Artificial Sequence
  Chemically Synthesized
QVQLQESGGGLVQAGGSLRLSCAASGNISGRYPMGWYRQAPGKEREFVATISNGTTTNYADSVKGRFTISRDNAKNTVYLQMNSLKPEDTAVYYCAAVGSWVLSLYWGQGTQVTVSS

SEQ ID NO: 37545 - protein, 126 aa, Artificial Sequence
  Chemically Synthesized
QVQLQESGGGLVQAGGSLRLSCAASGSIFGYEEMGWYRQAPGKEREFVAAIDDGTTTNYADSVKGRFTISRDNAKNTVYLQMNSLKPEDTAVYYCAVFWWGYPPYQTGKYQWYDYWGQGTQVTVSS

SEQ ID NO: 37546 - protein, 118 aa, Artificial Sequence
  Chemically Synthesized
QVQLQESGGGLVQAGGSLRLSCAASGSIFPEGDMGWYRQAPGKEREFVAAIDDGTTTYYADSVKGRFTISRDNAKNTVYLQMNSLKPEDTAVYYCAVVVTNGYPHSYWGQGTQVTVSS

SEQ ID NO: 37547 - protein, 126 aa, Artificial Sequence
  Chemically Synthesized
QVQLQESGGGLVQAGGSLRLSCAASGNISGGWTMGWYRQAPGKEREFVASITAGANTNYADSVKGRFTISRDNAKNTVYLQMNSLKPEDTAVYYCAAYGFAEYPDLPNIFYALDYWGQGTQVTVSS

SEQ ID NO: 37548 - protein, 121 aa, Artificial Sequence
  Chemically Synthesized
QVQLQESGGGLVQAGGSLRLSCAASGNISGPTMGWYRQAPGKERELVATISWGGTTYYADSVKGRFTISRDNAKNTVYLQMNSLKPEDTAVYYCAVDSRGITPYAYWYRYWGQGTQVTVSS

SEQ ID NO: 37549 - protein, 118 aa, Artificial Sequence
  Chemically Synthesized
QVQLQESGGGLVQAGGSLRLSCAASGSIFRWYKMGWYRQAPGKERELVAGINYGTTTYYADSVKGRFTISRDNAKNTVYLQMNSLKPEDTAVYYCAAYRGFVKYLTYWGQGTQVTVSS

SEQ ID NO: 37550 - protein, 118 aa, Artificial Sequence
  Chemically Synthesized
QVQLQESGGGLVQAGGSLRLSCAASGTISVIRTMGWYRQAPGKERELVASIGYGASTNYADSVKGRFTISRDNAKNTVYLQMNSLKPEDTAVYYCAALISDWGQYGYWGQGTQVTVSS

SEQ ID NO: 37551 - protein, 118 aa, Artificial Sequence
  Chemically Synthesized
QVQLQESGGGLVQAGGSLRLSCAASGNIFGPDSMGWYRQAPGKEREHVAGIAYGSITNYADSVKGRFTISRDNAKNTVYLQMNSLKPEDTAVYYCAVGSWYWSTHFYWGQGTQVTVSS

SEQ ID NO: 37552 - protein, 122 aa, Artificial Sequence
  Chemically Synthesized
QVQLQESGGGLVQAGGSLRLSCAASGNISYTTVMGWYRQAPGKERELVASIGFGTTTNYADSVKGRFTISRDNAKNTVYLQMNSLKPEDTAVYYCAADHPSEASYRQQFRYWGQGTQVTVSS

SEQ ID NO: 37553 - protein, 121 aa, Artificial Sequence
  Chemically Synthesized
QVQLQESGGGLVQAGGSLRLSCAASGSISGYEPMGWYRQAPGKERELVAGIGDGTSTYADSVKGRFTISRDNAKNTVYLQMNSLKPEDTAVYYCAVRYAYSSPYAYAHSYWGQGTQVTVSS

SEQ ID NO: 37554 - protein, 122 aa, Artificial Sequence
  Chemically Synthesized
QVQLQESGGGLVQAGGSLRLSCAASGSISLDFTMGWYRQAPGKEREFVAGITYGTSTYYADSVKGRFTISRDNAKNTVYLQMNSLKPEDTAVYYCAAPLHPTGRWRYIYQYWGQGTQVTVSS

SEQ ID NO: 37555 - protein, 118 aa, Artificial Sequence
  Chemically Synthesized
QVQLQESGGGLVQAGGSLRLSCAASGTISYVGWMGWYRQAPGKEREFVAGITGGATTYYADSVKGRFTISRDNAKNTVYLQMNSLKPEDTAVYYCAVYAGYVRDHPYWGQGTQVTVSS

SEQ ID NO: 37556 - protein, 110 aa, Artificial Sequence
  Chemically Synthesized
QVQLQESGGGLVQAGGSLRLSCAASGNISWYWAMGWYRQAPGKEREFVAAIGDGSITYYADSVKGRFTISRDNAKNTVYLQMNSLKPEDTAVYYCAVIYWGQGTQVTVSS

SEQ ID NO: 37557 - protein, 117 aa, Artificial Sequence
  Chemically Synthesized
QVQLQESGGGLVQAGGSLRLSCAASGYISGYLGMGWYRQAPGKEREFVAGINWGTITNYADSVKGRFTISRDNAKNTVYLQMNSLKPEDTAVYYCAARETNANVYYWGQGTQVTVSS

SEQ ID NO: 37558 - protein, 121 aa, Artificial Sequence
  Chemically Synthesized
QVQLQESGGGLVQAGGSLRLSCAASGYIFRKTSMGWYRQAPGKEREFVAGIDSGTSTNYADSVKGRFTISRDNAKNTVYLQMNSLKPEDTAVYYCAVPLSLFCRWTLTLYWGQGTQVTVSS

SEQ ID NO: 37559 - protein, 122 aa, Artificial Sequence
  Chemically Synthesized
QVQLQESGGGLVQAGGSLRLSCAASGNISEWTDMGWYRQAPGKERELVAAISGGASTNYADSVKGRFTISRDNAKNTVYLQMNSLKPEDTAVYYCAAYYLAWYIVDDEYYYWGQGTQVTVSS

SEQ ID NO: 37560 - protein, 118 aa, Artificial Sequence
  Chemically Synthesized
QVQLQESGGGLVQAGGSLRLSCAASGYISYYAYMGWYRQAPGKEREFVAAINRGTNTYYADSVKGRFTISRDNAKNTVYLQMNSLKPEDTAVYYCAVTRRKTTWLGYWGQGTQVTVSS

SEQ ID NO: 37561 - protein, 124 aa, Artificial Sequence
  Chemically Synthesized
QVQLQESGGGLVQAGGSLRLSCAASGYIFWYSYMGWYRQAPGKERELVATIDVGSTTYADSVKGRFTISRDNAKNTVYLQMNSLKPEDTAVYYCAATRVTDRYDLPRSTTFMYWGQGTQVTVSS

SEQ ID NO: 37562 - protein, 122 aa, Artificial Sequence
  Chemically Synthesized
QVQLQESGGGLVQAGGSLRLSCAASGYIFVVAMGWYRQAPGKEREFVAGIGYGANTNYADSVKGRFTISRDNAKNTVYLQMNSLKPEDTAVYYCAARSQDNTDANYYPHWYWGQGTQVTVSS

SEQ ID NO: 37563 - protein, 122 aa, Artificial Sequence
  Chemically Synthesized
QVQLQESGGGLVQAGGSLRLSCAASGNIFPYTYMGWYRQAPGKEREFVATIDNGGNTYYADSVKGRFTISRDNAKNTVYLQMNSLKPEDTAVYYCAVYYRTDTDIKRDHGYWGQGTQVTVSS

SEQ ID NO: 37564 - protein, 123 aa, Artificial Sequence
  Chemically Synthesized
QVQLQESGGGLVQAGGSLRLSCAASGTISDLDDMGWYRQAPGKEREFVAGIAEGSTTYYADSVKGRFTISRDNAKNTVYLQMNSLKPEDTAVYYCALTTLLVTLITNRLVFYWGQGTQVTVSS

SEQ ID NO: 37565 - protein, 118 aa, Artificial Sequence
  Chemically Synthesized
QVQLQESGGGLVQAGGSLRLSCAASGSISRRIAMGWYRQAPGKERELVAGIARGATTYYADSVKGRFTISRDNAKNTVYLQMNSLKPEDTAVYYCAALQRRYRDLYYWGQGTQVTVSS

SEQ ID NO: 37566 - protein, 119 aa, Artificial Sequence
  Chemically Synthesized
QVQLQESGGGLVQAGGSLRLSCAASGYISDGRSMGWYRQAPGKERELVAGIAPGTNTNYADSVKGRFTISRDNAKNTVYLQMNSLKPEDTAVYYCAAGWAQYDNYYFYWGQGTQVTVSS

SEQ ID NO: 37567 - protein, 117 aa, Artificial Sequence
  Chemically Synthesized
QVQLQESGGGLVQAGGSLRLSCAASGNISEWSMGWYRQAPGKERELVATIGYGSTTYYADSVKGRFTISRDNAKNTVYLQMNSLKPEDTAVYYCAAFEYNNAEYLYWGQGTQVTVSS

SEQ ID NO: 37568 - protein, 118 aa, Artificial Sequence
  Chemically Synthesized
QVQLQESGGGLVQAGGSLRLSCAASGNIFRYWKMGWYRQAPGKEREFVAGIAWGGITYYADSVKGRFTISRDNAKNTVYLQMNSLKPEDTAVYYCAVKNRYYWRLYYWGQGTQVTVSS

SEQ ID NO: 37569 - protein, 118 aa, Artificial Sequence
  Chemically Synthesized
QVQLQESGGGLVQAGGSLRLSCAASGTISPHTRMGWYRQAPGKEREFVATIGVGSSTYYADSVKGRFTISRDNAKNTVYLQMNSLKPEDTAVYYCAAYYDYRGAFPYWGQGTQVTVSS

SEQ ID NO: 37570 - protein, 118 aa, Artificial Sequence
  Chemically Synthesized
QVQLQESGGGLVQAGGSLRLSCAASGSISTRGGMGWYRQAPGKERELVASINYGTSTYYADSVKGRFTISRDNAKNTVYLQMNSLKPEDTAVYYCAVGRRRGWFHVYWGQGTQVTVSS

SEQ ID NO: 37571 - protein, 122 aa, Artificial Sequence
  Chemically Synthesized
QVQLQESGGGLVQAGGSLRLSCAASGYISGTVAMGWYRQAPGKEREFVAAINYGANTNYADSVKGRFTISRDNAKNTVYLQMNSLKPEDTAVYYCAVTPIRFYAHEHGHAYWGQGTQVTVSS

SEQ ID NO: 37572 - protein, 117 aa, Artificial Sequence
  Chemically Synthesized
QVQLQESGGGLVQAGGSLRLSCAASGYISPFYIMGWYRQAPGKERELVAGIDDGGTTNYADSVKGRFTISRDNAKNTVYLQMNSLKPEDTAVYYCADNYYRWQLDYWGQGTQVTVSS

SEQ ID NO: 37573 - protein, 122 aa, Artificial Sequence
  Chemically Synthesized
QVQLQESGGGLVQAGGSLRLSCAASGYIFGTGWMGWYRQAPGKEREFVAGISYGGITYYADSVKGRFTISRDNAKNTVYLQMNSLKPEDTAVYYCAAPPLVLYYYRLIHEYWGQGTQVTVSS

SEQ ID NO: 37574 - protein, 118 aa, Artificial Sequence
  Chemically Synthesized
QVQLQESGGGLVQAGGSLRLSCAASGTIFPDNDMGWYRQAPGKERELVASIANGGNTNYADSVKGRFTISRDNAKNTVYLQMNSLKPEDTAVYYCAAIDITRRGHSYWGQGTQVTVSS

SEQ ID NO: 37575 - protein, 118 aa, Artificial Sequence
  Chemically Synthesized
QVQLQESGGGLVQAGGSLRLSCAASGTIFKPSSMGWYRQAPGKEREFVATIGRGGNTNYADSVKGRFTISRDNAKNTVYLQMNSLKPEDTAVYYCAVGRFIAWRLTYWGQGTQVTVSS

SEQ ID NO: 37576 - protein, 118 aa, Artificial Sequence
  Chemically Synthesized
QVQLQESGGGLVQAGGSLRLSCAASGNISRTRTMGWYRQAPGKEREFVASINSGTSTYYADSVKGRFTISRDNAKNTVYLQMNSLKPEDTAVYYCAAGILYKPQYGYWGQGTQVTVSS

SEQ ID NO: 37577 - protein, 125 aa, Artificial Sequence
  Chemically Synthesized
QVQLQESGGGLVQAGGSLRLSCAASGSISHCLMGWYRQAPGKERELVAAIGPGSSTNYADSVKGRFTISRDNAKNTVYLQMNSLKPEDTAVYYCAVAITYRDRIREYRARLHTYWGQGTQVTVSS

SEQ ID NO: 37578 - protein, 115 aa, Artificial Sequence
  Chemically Synthesized
QVQLQESGGGLVQAGGSLRLSCAASGNIFWFVVMGWYRQAPGKEREFVAAISYGGTTNYADSVKGRFTISRDNAKNTVYLQMNSLKPEDTAVYYCAAYRRVHTYWGQGTQVTVSS

SEQ ID NO: 37579 - protein, 118 aa, Artificial Sequence
  Chemically Synthesized
QVQLQESGGGLVQAGGSLRLSCAASGTISPFIYMGWYRQAPGKERELVASIDSGSTTYYADSVKGRFTISRDNAKNTVYLQMNSLKPEDTAVYYCAAQDYFAGYHHYWGQGTQVTVSS

SEQ ID NO: 37580 - protein, 122 aa, Artificial Sequence
  Chemically Synthesized
QVQLQESGGGLVQAGGSLRLSCAASGNISSAYSMGWYRQAPGKEREFVAAIALGSITYYADSVKGRFTISRDNAKNTVYLQMNSLKPEDTAVYYCAVVSAGLRAQYSAHVYWGQGTQVTVSS

SEQ ID NO: 37581 - protein, 122 aa, Artificial Sequence
  Chemically Synthesized
QVQLQESGGGLVQAGGSLRLSCAASGTISTYDIMGWYRQAPGKEREFVAAINLGASTYYADSVKGRFTISRDNAKNTVYLQMNSLKPEDTAVYYCAAYADWGVIQSWYFGYWGQGTQVTVSS

SEQ ID NO: 37582 - protein, 118 aa, Artificial Sequence
  Chemically Synthesized
QVQLQESGGGLVQAGGSLRLSCAASGNISGVTNMGWYRQAPGKEREFVAAIGRGGNTYYADSVKGRFTISRDNAKNTVYLQMNSLKPEDTAVYYCAAPGTYDYRLEYWGQGTQVTVSS

SEQ ID NO: 37583 - protein, 118 aa, Artificial Sequence
  Chemically Synthesized
QVQLQESGGGLVQAGGSLRLSCAASGYISVSAYMGWYRQAPGKERELVAAIDRGANTNYADSVKGRFTISRDNAKNTVYLQMNSLKPEDTAVYYCAAGDHIDVHHDYWGQGTQVTVSS

SEQ ID NO: 37584 - protein, 118 aa, Artificial Sequence
  Chemically Synthesized
QVQLQESGGGLVQAGGSLRLSCAASGTISRPALMGWYRQAPGKEREFVAAISIGGTTYYADSVKGRFTISRDNAKNTVYLQMNSLKPEDTAVYYCAVRYTRSDIHYYWGQGTQVTVSS

SEQ ID NO: 37585 - protein, 126 aa, Artificial Sequence
  Chemically Synthesized
QVQLQESGGGLVQAGGSLRLSCAASGSISRYGPMGWYRQAPGKEREFVATIAYGGNTNYADSVKGRFTISRDNAKNTVYLQMNSLKPEDTAVYYCAASRGGDVYDNHRDRDGLIYWGQGTQVTVSS

SEQ ID NO: 37586 - protein, 118 aa, Artificial Sequence
  Chemically Synthesized
QVQLQESGGGLVQAGGSLRLSCAASGNIFVRTYMGWYRQAPGKEREFVAGITLGANTNYADSVKGRFTISRDNAKNTVYLQMNSLKPEDTAVYYCAAFYRWSDRHTYWGQGTQVTVSS

SEQ ID NO: 37587 - protein, 121 aa, Artificial Sequence
  Chemically Synthesized
QVQLQESGGGLVQAGGSLRLSCAASGTIFYSLVMGWYRQAPGKERELLPVLLLVLLPYADSVKGRFTISRDNAKNTVYLQMNSLKPEDTAVYYCAVDLYFFNYQYYYHYYWGQGTQVTVSS

SEQ ID NO: 37588 - protein, 126 aa, Artificial Sequence
  Chemically Synthesized
QVQLQESGGGLVQAGGSLRLSCAASGYISWLGYMGWYRQAPGKERELVAAINTGAITNYADSVKGRFTISRDNAKNTVYLQMNSLKPEDTAVYYCAVLYYYQYLDSYRVYIDHRYWGQGTQVTVSS

SEQ ID NO: 37589 - protein, 126 aa, Artificial Sequence
  Chemically Synthesized
QVQLQESGGGLVQAGGSLRLSCAASGYISRPWGMGWYRQAPGKERELVATITRGSTTYYADSVKGRFTISRDNAKNTVYLQMNSLKPEDTAVYYCAANVAAVTKDNDYQRYQHDYWGQGTQVTVSS

SEQ ID NO: 37590 - protein, 126 aa, Artificial Sequence
  Chemically Synthesized
QVQLQESGGGLVQAGGSLRLSCAASGYIFGYRLMGWYRQAPGKERELVAGIGYGSTTNYADSVKGRFTISRDNAKNTVYLQMNSLKPEDTAVYYCAARSTRFSSYFDYDVVSHRYWGQGTQVTVSS

SEQ ID NO: 37591 - protein, 117 aa, Artificial Sequence
  Chemically Synthesized
QVQLQESGGGLVQAGGSLRLSCAASGSIFDSGIMGWYRQAPGKERELVATITTGSTTNYADSVKGRFTISRDNAKNTVYLQMNSLKPEDTAVYYCAVGETLTLLFYWGQGTQVTVSS

SEQ ID NO: 37592 - protein, 110 aa, Artificial Sequence
  Chemically Synthesized
QVQLQESGGGLVQAGGSLRLSCAASGSIFRTPDMGWYRQAPGKERELVATIGLGANTYYADSVKGRFTISRDNAKNTVYLQMNSLKPEDTAVYYCAACYWGQGTQVTVSS

SEQ ID NO: 37593 - protein, 121 aa, Artificial Sequence
  Chemically Synthesized
QVQLQESGGGLVQAGGSLRLSCAASGTIFNYWFMGWYRQAPGKEREFVAGIDPGSTTNYADSVKGRFTISRDNAKNTVYLQMNSLKPEDTAVYYCAASSGGGSTTTLLFYWGQGTQVTVSS

SEQ ID NO: 37594 - protein, 117 aa, Artificial Sequence
  Chemically Synthesized
QVQLQESGGGLVQAGGSLRLSCAASGNIFSYEYMGWYRQAPGKERELVAGINYGTSTNYADSVKGRFTISRDNAKNTVYLQMNSLKPEDTAVYYCAVPIWYGAHHYWGQGTQVTVSS

SEQ ID NO: 37595 - protein, 118 aa, Artificial Sequence
  Chemically Synthesized
QVQLQESGGGLVQAGGSLRLSCAASGYISDPGIMGWYRQAPGKEREFVATIAYGGITYYADSVKGRFTISRDNAKNTVYLQMNSLKPEDTAVYYCAVGTKRLAYLPYWGQGTQVTVSS

SEQ ID NO: 37596 - protein, 126 aa, Artificial Sequence
  Chemically Synthesized
QVQLQESGGGLVQAGGSLRLSCAASGTISYSFLMGWYRQAPGKERELLPVLMLVVLPYADSVKGRFTISRDNAKNTVYLQMNSLKPEDTAVYYCAVTGSTDDATRADAAATDLLYWGQGTQVTVSS

SEQ ID NO: 37597 - protein, 121 aa, Artificial Sequence
  Chemically Synthesized
QVQLQESGGGLVQAGGSLRLSCAASGYIFVRGMGWYRQAPGKEREFVAAINAGSTTNYADSVKGRFTISRDNAKNTVYLQMNSLKPEDTAVYYCAADAFIREYWQDDLDYWGQGTQVTVSS

SEQ ID NO: 37598 - protein, 118 aa, Artificial Sequence
  Chemically Synthesized
QVQLQESGGGLVQAGGSLRLSCAASGNISRYSLMGWYRQAPGKEREFVASINTGTTTYYADSVKGRFTISRDNAKNTVYLQMNSLKPEDTAVYYCAVVSGSFFTHRYWGQGTQVTVSS

SEQ ID NO: 37599 - protein, 126 aa, Artificial Sequence
  Chemically Synthesized
QVQLQESGGGLVQAGGSLRLSCAASGTIFPPVVMGWYRQAPGKERELVAGISSGSTTYYADSVKGRFTISRDNAKNTVYLQMNSLKPEDTAVYYCAVHAVAWADREVRGSGVFRYWGQGTQVTVSS

SEQ ID NO: 37600 - protein, 118 aa, Artificial Sequence
  Chemically Synthesized
QVQLQESGGGLVQAGGSLRLSCAASGTISWHRRMGWYRQAPGKERELVATIGYGSNTNYADSVKGRFTISRDNAKNTVYLQMNSLKPEDTAVYYCAARGYKIPTYRYWGQGTQVTVSS

SEQ ID NO: 37601 - protein, 118 aa, Artificial Sequence
  Chemically Synthesized
QVQLQESGGGLVQAGGSLRLSCAASGYISHPYLMGWYRQAPGKERELVATIGDGTNTNYADSVKGRFTISRDNAKNTVYLQMNSLKPEDTAVYYCAVLHREKLQHLYWGQGTQVTVSS

SEQ ID NO: 37602 - protein, 118 aa, Artificial Sequence
  Chemically Synthesized
QVQLQESGGGLVQAGGSLRLSCAASGNIFDFTDMGWYRQAPGKERELVAAIGVGASTYYADSVKGRFTISRDNAKNTVYLQMNSLKPEDTAVYYCAVVDYARGDLSYWGQGTQVTVSS

SEQ ID NO: 37603 - protein, 118 aa, Artificial Sequence
  Chemically Synthesized
QVQLQESGGGLVQAGGSLRLSCAASGSIFPYRIMGWYRQAPGKEREFVATITRGGNTNYADSVKGRFTISRDNAKNTVYLQMNSLKPEDTAVYYCAAVLYNRSRLTYWGQGTQVTVSS

SEQ ID NO: 37604 - protein, 122 aa, Artificial Sequence
  Chemically Synthesized
QVQLQESGGGLVQAGGSLRLSCAASGNISRTPTMGWYRQAPGKERELVAGISVGASTYYADSVKGRFTISRDNAKNTVYLQMNSLKPEDTAVYYCAAWYEDWRLYIYYFWYWGQGTQVTVSS

SEQ ID NO: 37605 - protein, 115 aa, Artificial Sequence
  Chemically Synthesized
QVQLQESGGGLVQAGGSLRLSCAASGSIFGRVRMGWYRQAPGKERELVAGITYGGSTYYADSVKGRFTISRDNAKNTVYLQMNSLKPEDTAVYYCAVAVYVFVYWGQGTQVTVSS

SEQ ID NO: 37606 - protein, 122 aa, Artificial Sequence
  Chemically Synthesized
QVQLQESGGGLVQAGGSLRLSCAASGYIFLYPAMGWYRQAPGKERELVAGIDDGTTTYYADSVKGRFTISRDNAKNTVYLQMNSLKPEDTAVYYCAAYHSGDSDAEYVLLYWGQGTQVTVSS

SEQ ID NO: 37607 - protein, 126 aa, Artificial Sequence
  Chemically Synthesized
QVQLQESGGGLVQAGGSLRLSCAASGSISDQYDMGWYRQAPGKERELVATIGYGASTYYADSVKGRFTISRDNAKNTVYLQMNSLKPEDTAVYYCAVSYPVQIDDVYDSPKEFLYWGQGTQVTVSS

SEQ ID NO: 37608 - protein, 118 aa, Artificial Sequence
  Chemically Synthesized
QVQLQESGGGLVQAGGSLRLSCAASGYISRYRKMGWYRQAPGKERELVAGINYGTITNYADSVKGRFTISRDNAKNTVYLQMNSLKPEDTAVYYCAVGYVSTGRLRYWGQGTQVTVSS

SEQ ID NO: 37609 - protein, 118 aa, Artificial Sequence
  Chemically Synthesized
QVQLQESGGGLVQAGGSLRLSCAASGYISYYVIMGWYRQAPGKERELVATIAAGSTTNYADSVKGRFTISRDNAKNTVYLQMNSLKPEDTAVYYCAADQVDDTYHTYWGQGTQVTVSS

SEQ ID NO: 37610 - protein, 122 aa, Artificial Sequence
  Chemically Synthesized
QVQLQESGGGLVQAGGSLRLSCAASGTISLWIYMGWYRQAPGKERELVASISNGSSTYYADSVKGRFTISRDNAKNTVYLQMNSLKPEDTAVYYCAVNVNLYDYEYVFLRYWGQGTQVTVSS

SEQ ID NO: 37611 - protein, 124 aa, Artificial Sequence
  Chemically Synthesized
QVQLQESGGGLVQAGGSLRLSCAASGYISLREDMGWYRQAPGKEREFVAGISHGGTTNYADSVKGRFTISRDNAKNTVYLQMNSLKPEDTAVYYCAAIRYLSVGEARYQDFTYWGQGTQVTVSS

SEQ ID NO: 37612 - protein, 122 aa, Artificial Sequence
  Chemically Synthesized
QVQLQESGGGLVQAGGSLRLSCAASGTISGQYTMGWYRQAPGKERELVAAINYGTSTNYADSVKGRFTISRDNAKNTVYLQMNSLKPEDTAVYYCAVVDRADQDVGGRHGYWGQGTQVTVSS

SEQ ID NO: 37613 - protein, 126 aa, Artificial Sequence
  Chemically Synthesized
QVQLQESGGGLVQAGGSLRLSCAASGYIFRRLEMGWYRQAPGKEREFVATINHGAITNYADSVKGRFTISRDNAKNTVYLQMNSLKPEDTAVYYCAVVAESTWRYGRNPKGRHYYWGQGTQVTVSS

SEQ ID NO: 37614 - protein, 122 aa, Artificial Sequence
  Chemically Synthesized
QVQLQESGGGLVQAGGSLRLSCAASGYISRSILMGWYRQAPGKEREFVATIDGGSTTNYADSVKGRFTISRDNAKNTVYLQMNSLKPEDTAVYYCAVVYDLDRPRDIRFWYWGQGTQVTVSS

SEQ ID NO: 37615 - protein, 114 aa, Artificial Sequence
  Chemically Synthesized
QVQLQESGGGLVQAGGSLRLSCAASGNISDYSDMGWYRQAPGKERELVAGIDSGGITNYADSVKGRFTISRDNAKNTVYLQMNSLKPEDTAVYYCAETGHPFYWGQGTQVTVSS

SEQ ID NO: 37616 - protein, 117 aa, Artificial Sequence
  Chemically Synthesized
QVQLQESGGGLVQAGGSLRLSCAASGTISEPTMGWYRQAPGKEREFVAGISDGSSTNYADSVKGRFTISRDNAKNTVYLQMNSLKPEDTAVYYCAAVRDLYVAHPYWGQGTQVTVSS

SEQ ID NO: 37617 - protein, 124 aa, Artificial Sequence
  Chemically Synthesized
QVQLQESGGGLVQAGGSLRLSCAASGSIFRSTMGWYRQAPGKEREFVAGIGVGTTTNYADSVKGRFTISRDNAKNTVYLQMNSLKPEDTAVYYCAVNQFTYGSIYGRGSAHDYWGQGTQVTVSS

SEQ ID NO: 37618 - protein, 118 aa, Artificial Sequence
  Chemically Synthesized
QVQLQESGGGLVQAGGSLRLSCAASGSIFYRKPMGWYRQAPGKERELVAGIDLGAITNYADSVKGRFTISRDNAKNTVYLQMNSLKPEDTAVYYCAVFGPYPRGFGYWGQGTQVTVSS

SEQ ID NO: 37619 - protein, 125 aa, Artificial Sequence
  Chemically Synthesized
QVQLQESGGGLVQAGGSLRLSCAASGSIFSSLMGWYRQAPGKERELVASITDGANTNYADSVKGRFTISRDNAKNTVYLQMNSLKPEDTAVYYCAAYTDLGQYTKDHYDGTHDYWGQGTQVTVSS

SEQ ID NO: 37620 - protein, 127 aa, Artificial Sequence
  Chemically Synthesized
QVQLQESGGGLVQAGGSLRLSCAASGSISPFYDMGWYRQAPGKERELVATIGEGASTNYADSVKGRFTISRDNAKNTVYLQMNSLKPEDTAVYYCAVAWLAYTGDEIYDEYFYHRYWGQGTQVTVSS

SEQ ID NO: 37621 - protein, 121 aa, Artificial Sequence
  Chemically Synthesized
QVQLQESGGGLVQAGGSLRLSCAASGTISVYVYMGWYRQAPGKEREFVATIGTGSSTNYADSVKGRFTISRDNAKNTVYLQMNSLKPEDTAVYYCAVDDSCRFCRTTFLYWGQGTQVTVSS

SEQ ID NO: 37622 - protein, 118 aa, Artificial Sequence
  Chemically Synthesized
QVQLQESGGGLVQAGGSLRLSCAASGNISLLYKMGWYRQAPGKEREFVAAIGRGGITNYADSVKGRFTISRDNAKNTVYLQMNSLKPEDTAVYYCAVRTIWYDQHNYWGQGTQVTVSS

SEQ ID NO: 37623 - protein, 122 aa, Artificial Sequence
  Chemically Synthesized
QVQLQESGGGLVQAGGSLRLSCAASGYISPTFIMGWYRQAPGKERELVAAITGGTSTYYADSVKGRFTISRDNAKNTVYLQMNSLKPEDTAVYYCAVYDQAEYVTYALYDYWGQGTQVTVSS

SEQ ID NO: 37624 - protein, 115 aa, Artificial Sequence
  Chemically Synthesized
QVQLQESGGGLVQAGGSLRLSCAASGNIFAYFKMGWYRQAPGKEREFVAAISYGTTTYYADSVKGRFTISRDNAKNTVYLQMNSLKPEDTAVYYCASGSYFHAYWGQGTQVTVSS

SEQ ID NO: 37625 - protein, 110 aa, Artificial Sequence
  Chemically Synthesized
QVQLQESGGGLVQAGGSLRLSCAASGNISPADIMGWYRQAPGKEREFVAAIDYGTITYYADSVKGRFTISRDNAKNTVYLQMNSLKPEDTAVYYCAHAYWGQGTQVTVSS

SEQ ID NO: 37626 - protein, 120 aa, Artificial Sequence
  Chemically Synthesized
QVQLQESGGGLVQAGGSLRLSCAASGNISGAAVMGWYRQAPGKERELVAAITYGTTTYYADSVKGRFTISRDNAKNTVYLQMNSLKPEDTAVYYCAVDRDHPQTDYELYWGQGTQVTVSS

SEQ ID NO: 37627 - protein, 118 aa, Artificial Sequence
  Chemically Synthesized
QVQLQESGGGLVQAGGSLRLSCAASGSISYRRAMGWYRQAPGKEREFVAGIARGANTYYADSVKGRFTISRDNAKNTVYLQMNSLKPEDTAVYYCAAKFSDYYVHRYWGQGTQVTVSS

SEQ ID NO: 37628 - protein, 121 aa, Artificial Sequence
  Chemically Synthesized
QVQLQESGGGLVQAGGSLRLSCAASGTIFELYMGWYRQAPGKERELVASIAEGSITNYADSVKGRFTISRDNAKNTVYLQMNSLKPEDTAVYYCAALYDVGYRVLDDLDYWGQGTQVTVSS

SEQ ID NO: 37629 - protein, 122 aa, Artificial Sequence
  Chemically Synthesized
QVQLQESGGGLVQAGGSLRLSCAASGNISIYYYMGWYRQAPGKERELVAAITVGGNTNYADSVKGRFTISRDNAKNTVYLQMNSLKPEDTAVYYCAVIYGTTDPYGWHYTYWGQGTQVTVSS

SEQ ID NO: 37630 - protein, 118 aa, Artificial Sequence
  Chemically Synthesized
QVQLQESGGGLVQAGGSLRLSCAASGYISPPGAMGWYRQAPGKEREFVASITYGTTTNYADSVKGRFTISRDNAKNTVYLQMNSLKPEDTAVYYCAVELLYGDTYVYWGQGTQVTVSS

SEQ ID NO: 37631 - protein, 117 aa, Artificial Sequence
  Chemically Synthesized
QVQLQESGGGLVQAGGSLRLSCAASGTISGYSMGWYRQAPGKERELVAAIDVGASTNYADSVKGRFTISRDNAKNTVYLQMNSLKPEDTAVYYCAAPDWLLSSYPYWGQGTQVTVSS

SEQ ID NO: 37632 - protein, 125 aa, Artificial Sequence
  Chemically Synthesized
QVQLQESGGGLVQAGGSLRLSCAASGSISSYVMGWYRQAPGKERELVAGIDTGSNTYYADSVKGRFTISRDNAKNTVYLQMNSLKPEDTAVYYCAVYYYRTNYRAHTPTLKFGYWGQGTQVTVSS

SEQ ID NO: 37633 - protein, 122 aa, Artificial Sequence
  Chemically Synthesized
QVQLQESGGGLVQAGGSLRLSCAASGSISQPVTMGWYRQAPGKERELVAGIDSGGTTNYADSVKGRFTISRDNAKNTVYLQMNSLKPEDTAVYYCAVEPYWGYWTRIRHRYWGQGTQVTVSS

SEQ ID NO: 37634 - protein, 118 aa, Artificial Sequence
  Chemically Synthesized
QVQLQESGGGLVQAGGSLRLSCAASGSISYLGYMGWYRQAPGKERELVAAIGYGASTNYADSVKGRFTISRDNAKNTVYLQMNSLKPEDTAVYYCAVDGPDPSYYYYWGQGTQVTVSS

SEQ ID NO: 37635 - protein, 126 aa, Artificial Sequence
  Chemically Synthesized
QVQLQESGGGLVQAGGSLRLSCAASGTIFPWPYMGWYRQAPGKERELVAAISDGATTYYADSVKGRFTISRDNAKNTVYLQMNSLKPEDTAVYYCAALLAQPQYYFTGDDAWYVYWGQGTQVTVSS

SEQ ID NO: 37636 - protein, 118 aa, Artificial Sequence
  Chemically Synthesized
QVQLQESGGGLVQAGGSLRLSCAASGTIFGGELMGWYRQAPGKEREFVATIDAGGTTNYADSVKGRFTISRDNAKNTVYLQMNSLKPEDTAVYYCAARYRHRDGHYYWGQGTQVTVSS

SEQ ID NO: 37637 - protein, 117 aa, Artificial Sequence
  Chemically Synthesized
QVQLQESGGGLVQAGGSLRLSCAASGYIFYVLPMGWYRQAPGKERELVAAINQGATTNYADSVKGRFTISRDNAKNTVYLQMNSLKPEDTAVYYCAVAGTGPPYEYWGQGTQVTVSS

SEQ ID NO: 37638 - protein, 122 aa, Artificial Sequence
  Chemically Synthesized
QVQLQESGGGLVQAGGSLRLSCAASGYISLYDYMGWYRQAPGKERELVAAISDGATTNYADSVKGRFTISRDNAKNTVYLQMNSLKPEDTAVYYCAARYYYPLIFASLLGYWGQGTQVTVSS

SEQ ID NO: 37639 - protein, 126 aa, Artificial Sequence
  Chemically Synthesized
QVQLQESGGGLVQAGGSLRLSCAASGYIFAYRSMGWYRQAPGKERELVAAITYGTTTYYADSVKGRFTISRDNAKNTVYLQMNSLKPEDTAVYYCAAPYYRITSIYSLYAYSHSYWGQGTQVTVSS

SEQ ID NO: 37640 - protein, 126 aa, Artificial Sequence
  Chemically Synthesized
QVQLQESGGGLVQAGGSLRLSCAASGNIFIPYHMGWYRQAPGKERELVASITGGTITYYADSVKGRFTISRDNAKNTVYLQMNSLKPEDTAVYYCAVSVRPSGYDYGLYDVDYLYWGQGTQVTVSS

SEQ ID NO: 37641 - protein, 118 aa, Artificial Sequence
  Chemically Synthesized
QVQLQESGGGLVQAGGSLRLSCAASGTIFSYYTMGWYRQAPGKERELVAAISPGAITNYADSVKGRFTISRDNAKNTVYLQMNSLKPEDTAVYYCAVVYIYYSPLTYWGQGTQVTVSS

SEQ ID NO: 37642 - protein, 117 aa, Artificial Sequence
  Chemically Synthesized
QVQLQESGGGLVQAGGSLRLSCAASGYISAGFQMGWYRQAPGKERELVAAITTGGTTYYADSVKGRFTISRDNAKNTVYLQMNSLKPEDTAVYYCAVDDSLTLVFYWGQGTQVTVSS

SEQ ID NO: 37643 - protein, 122 aa, Artificial Sequence
  Chemically Synthesized
QVQLQESGGGLVQAGGSLRLSCAASGYISPHARMGWYRQAPGKEREFVAAIGLGSTTNYADSVKGRFTISRDNAKNTVYLQMNSLKPEDTAVYYCAARSRYRTGSHIRHSYWGQGTQVTVSS

SEQ ID NO: 37644 - protein, 118 aa, Artificial Sequence
  Chemically Synthesized
QVQLQESGGGLVQAGGSLRLSCAASGYIFTLLEMGWYRQAPGKERELVAAINPGTTTYYADSVKGRFTISRDNAKNTVYLQMNSLKPEDTAVYYCAVYAFRDAWFVYWGQGTQVTVSS

SEQ ID NO: 37645 - protein, 118 aa, Artificial Sequence
  Chemically Synthesized
QVQLQESGGGLVQAGGSLRLSCAASGNIFRADRMGWYRQAPGKEREFVATIGRGGITYYADSVKGRFTISRDNAKNTVYLQMNSLKPEDTAVYYCAVRYTRGGFHVYWGQGTQVTVSS

SEQ ID NO: 37646 - protein, 118 aa, Artificial Sequence
  Chemically Synthesized
QVQLQESGGGLVQAGGSLRLSCAASGNIFRFIVMGWYRQAPGKERELVATIDRGAITYYADSVKGRFTISRDNAKNTVYLQMNSLKPEDTAVYYCAAIYRYWSRHNYWGQGTQVTVSS

SEQ ID NO: 37647 - protein, 121 aa, Artificial Sequence
  Chemically Synthesized
QVQLQESGGGLVQAGGSLRLSCAASGNIFSQFVMGWYRQAPGKERELVAGINDGGSTYYADSVKGRFTISRDNAKNTVYLQMNSLKPEDTAVYYCAAYRYRIWGRRDLRYWGQGTQVTVSS

SEQ ID NO: 37648 - protein, 122 aa, Artificial Sequence
  Chemically Synthesized
QVQLQESGGGLVQAGGSLRLSCAASGNISRTYTMGWYRQAPGKEREFVAAIATGSTTYYADSVKGRFTISRDNAKNTVYLQMNSLKPEDTAVYYCAAYFLHYRSLLDAHSYWGQGTQVTVSS

SEQ ID NO: 37649 - protein, 122 aa, Artificial Sequence
  Chemically Synthesized
QVQLQESGGGLVQAGGSLRLSCAASGTISRTIRMGWYRQAPGKERELVATIDRGTTTNYADSVKGRFTISRDNAKNTVYLQMNSLKPEDTAVYYCAVDLEQPPSVNVAHWYWGQGTQVTVSS

SEQ ID NO: 37650 - protein, 121 aa, Artificial Sequence
  Chemically Synthesized
QVQLQESGGGLVQAGGSLRLSCAASGYISGLYAMGWYRQAPGKERELVASIGGGGTTNYADSVKGRFTISRDNAKNTVYLQMNSLKPEDTAVYYCAVDIRDSYGSRVTMYWGQGTQVTVSS

SEQ ID NO: 37651 - protein, 126 aa, Artificial Sequence
  Chemically Synthesized
QVQLQESGGGLVQAGGSLRLSCAASGNISVWTWMGWYRQAPGKERELVASIAYGASTNYADSVKGRFTISRDNAKNTVYLQMNSLKPEDTAVYYCAAEWTSHYLRGDWERDDFYYWGQGTQVTVSS

SEQ ID NO: 37652 - protein, 122 aa, Artificial Sequence
  Chemically Synthesized
QVQLQESGGGLVQAGGSLRLSCAASGSIFGGSQMGWYRQAPGKERELVASITVGGITNYADSVKGRFTISRDNAKNTVYLQMNSLKPEDTAVYYCAAVDRVYGRITRQFEYWGQGTQVTVSS

SEQ ID NO: 37653 - protein, 126 aa, Artificial Sequence
  Chemically Synthesized
QVQLQESGGGLVQAGGSLRLSCAASGYIFRAYEMGWYRQAPGKERELVASIAGGANTNYADSVKGRFTISRDNAKNTVYLQMNSLKPEDTAVYYCAVSRYKRFYPWAYRYGYLYYWGQGTQVTVSS

SEQ ID NO: 37654 - protein, 118 aa, Artificial Sequence
  Chemically Synthesized
QVQLQESGGGLVQAGGSLRLSCAASGNIFTRTPMGWYRQAPGKEREFVAGISYGGTTYYADSVKGRFTISRDNAKNTVYLQMNSLKPEDTAVYYCAARIVRRDRFIYWGQGTQVTVSS

SEQ ID NO: 37655 - protein, 122 aa, Artificial Sequence
  Chemically Synthesized
QVQLQESGGGLVQAGGSLRLSCAASGTIFYKTAMGWYRQAPGKEREFVATINYGASTNYADSVKGRFTISRDNAKNTVYLQMNSLKPEDTAVYYCAVPDDDDGFTFYYHVYWGQGTQVTVSS

SEQ ID NO: 37656 - protein, 122 aa, Artificial Sequence
  Chemically Synthesized
QVQLQESGGGLVQAGGSLRLSCAASGNISDRTAMGWYRQAPGKERELVAGIAPGANTNYADSVKGRFTISRDNAKNTVYLQMNSLKPEDTAVYYCAVDPVVPYLQGYDHDYWGQGTQVTVSS

SEQ ID NO: 37657 - protein, 118 aa, Artificial Sequence
  Chemically Synthesized
QVQLQESGGGLVQAGGSLRLSCAASGYISPRYTMGWYRQAPGKEREFVAAITRGAITYYADSVKGRFTISRDNAKNTVYLQMNSLKPEDTAVYYCAVAFGRYDRHYYWGQGTQVTVSS

SEQ ID NO: 37658 - protein, 114 aa, Artificial Sequence
  Chemically Synthesized
QVQLQESGGGLVQAGGSLRLSCAASGYISRNGYMGWYRQAPGKEREFVAAIDSGTSTNYADSVKGRFTISRDNAKNTVYLQMNSLKPEDTAVYYCAYRYYLRYWGQGTQVTVSS

SEQ ID NO: 37659 - protein, 126 aa, Artificial Sequence
  Chemically Synthesized
QVQLQESGGGLVQAGGSLRLSCAASGYIFSHKRMGWYRQAPGKEREFVASISVGGNTYYADSVKGRFTISRDNAKNTVYLQMNSLKPEDTAVYYCAVRDWGQISRGPAYYRRHPYWGQGTQVTVSS

SEQ ID NO: 37660 - protein, 118 aa, Artificial Sequence
  Chemically Synthesized
QVQLQESGGGLVQAGGSLRLSCAASGYIFDYVEMGWYRQAPGKEREFVAGIAYGGTTNYADSVKGRFTISRDNAKNTVYLQMNSLKPEDTAVYYCAVVFLPYRVHVYWGQGTQVTVSS

SEQ ID NO: 37661 - protein, 118 aa, Artificial Sequence
  Chemically Synthesized
QVQLQESGGGLVQAGGSLRLSCAASGTISRYDLMGWYRQAPGKEREFVAAIARGSITYYADSVKGRFTISRDNAKNTVYLQMNSLKPEDTAVYYCAAHYTSYATHDYWGQGTQVTVSS

SEQ ID NO: 37662 - protein, 118 aa, Artificial Sequence
  Chemically Synthesized
QVQLQESGGGLVQAGGSLRLSCAASGSIFQYSTMGWYRQAPGKEREFVAAIAYGASTYYADSVKGRFTISRDNAKNTVYLQMNSLKPEDTAVYYCAAIPYDDDRLTYWGQGTQVTVSS

SEQ ID NO: 37663 - protein, 118 aa, Artificial Sequence
  Chemically Synthesized
QVQLQESGGGLVQAGGSLRLSCAASGYIFVYHWMGWYRQAPGKEREFVAAIGPGSITNYADSVKGRFTISRDNAKNTVYLQMNSLKPEDTAVYYCAAYVDVRNDHVYWGQGTQVTVSS

SEQ ID NO: 37664 - protein, 126 aa, Artificial Sequence
  Chemically Synthesized
QVQLQESGGGLVQAGGSLRLSCAASGTISGSYRMGWYRQAPGKEREFVAGIGTGAITNYADSVKGRFTISRDNAKNTVYLQMNSLKPEDTAVYYCAAYDGGDSSVQERYLRAYVYWGQGTQVTVSS

SEQ ID NO: 37665 - protein, 126 aa, Artificial Sequence
  Chemically Synthesized
QVQLQESGGGLVQAGGSLRLSCAASGSIFYSGTMGWYRQAPGKERELVATIDQGASTYYADSVKGRFTISRDNAKNTVYLQMNSLKPEDTAVYYCAARIPQSYWRGIYYSWYHSYWGQGTQVTVSS

SEQ ID NO: 37666 - protein, 118 aa, Artificial Sequence
  Chemically Synthesized
QVQLQESGGGLVQAGGSLRLSCAASGTIFNVKAMGWYRQAPGKEREFVAAISYGANTNYADSVKGRFTISRDNAKNTVYLQMNSLKPEDTAVYYCAAQSRWYVYLTYWGQGTQVTVSS

SEQ ID NO: 37667 - protein, 126 aa, Artificial Sequence
  Chemically Synthesized
QVQLQESGGGLVQAGGSLRLSCAASGNISPQRTMGWYRQAPGKERELVASIGDGAITYYADSVKGRFTISRDNAKNTVYLQMNSLKPEDTAVYYCAVDFGVYYYLARAQGDDHNYWGQGTQVTVSS

SEQ ID NO: 37668 - protein, 122 aa, Artificial Sequence
  Chemically Synthesized
QVQLQESGGGLVQAGGSLRLSCAASGTISQGGGMGWYRQAPGKERELVASIDPGGITYYADSVKGRFTISRDNAKNTVYLQMNSLKPEDTAVYYCAVEWTVYVPYDRDYAYWGQGTQVTVSS

SEQ ID NO: 37669 - protein, 118 aa, Artificial Sequence
  Chemically Synthesized
QVQLQESGGGLVQAGGSLRLSCAASGTIFSYSPMGWYRQAPGKERELVATISGGTSTNYADSVKGRFTISRDNAKNTVYLQMNSLKPEDTAVYYCAAVTGWWRRFFYWGQGTQVTVSS

SEQ ID NO: 37670 - protein, 122 aa, Artificial Sequence
  Chemically Synthesized
QVQLQESGGGLVQAGGSLRLSCAASGSIFYRDYMGWYRQAPGKERELLMLVVLPYADSVKGRFTISRDNAKNTVYLQMNSLKPEDTAVYYCAVTESHPGRDYDGDYYDHGYWGQGTQVTVSS

SEQ ID NO: 37671 - protein, 118 aa, Artificial Sequence
  Chemically Synthesized
QVQLQESGGGLVQAGGSLRLSCAASGNISQLARMGWYRQAPGKEREFVAAIANGSSTNYADSVKGRFTISRDNAKNTVYLQMNSLKPEDTAVYYCAVLGTAEGHLGYWGQGTQVTVSS

SEQ ID NO: 37672 - protein, 122 aa, Artificial Sequence
  Chemically Synthesized
QVQLQESGGGLVQAGGSLRLSCAASGYISYFHRMGWYRQAPGKEREFVAGIGSGTNTYYADSVKGRFTISRDNAKNTVYLQMNSLKPEDTAVYYCAVVWWYKYRWPYKHDYWGQGTQVTVSS

SEQ ID NO: 37673 - protein, 118 aa, Artificial Sequence
  Chemically Synthesized
QVQLQESGGGLVQAGGSLRLSCAASGNIFNVYYMGWYRQAPGKEREFVAAITAGAITYYADSVKGRFTISRDNAKNTVYLQMNSLKPEDTAVYYCAADLGIGTWYIYWGQGTQVTVSS

SEQ ID NO: 37674 - protein, 126 aa, Artificial Sequence
  Chemically Synthesized
QVQLQESGGGLVQAGGSLRLSCAASGSISWYAKMGWYRQAPGKEREFVAGIGYGASTNYADSVKGRFTISRDNAKNTVYLQMNSLKPEDTAVYYCAAKKYSRRYGYERNYFVHSYWGQGTQVTVSS

SEQ ID NO: 37675 - protein, 118 aa, Artificial Sequence
  Chemically Synthesized
QVQLQESGGGLVQAGGSLRLSCAASGTISGPTRMGWYRQAPGKEREFVASINDGANTNYADSVKGRFTISRDNAKNTVYLQMNSLKPEDTAVYYCAVAYVLDPYHGYWGQGTQVTVSS

SEQ ID NO: 37676 - protein, 122 aa, Artificial Sequence
  Chemically Synthesized
QVQLQESGGGLVQAGGSLRLSCAASGYISDWAYMGWYRQAPGKEREFVAGIDLGGNTYYADSVKGRFTISRDNAKNTVYLQMNSLKPEDTAVYYCAAVTDEYVDAGWFFLYWGQGTQVTVSS

SEQ ID NO: 37677 - protein, 118 aa, Artificial Sequence
  Chemically Synthesized
QVQLQESGGGLVQAGGSLRLSCAASGNISHRRAMGWYRQAPGKEREFVAAIDSGTNTNYADSVKGRFTISRDNAKNTVYLQMNSLKPEDTAVYYCAVARRYPYWHRYWGQGTQVTVSS

SEQ ID NO: 37678 - protein, 117 aa, Artificial Sequence
  Chemically Synthesized
QVQLQESGGGLVQAGGSLRLSCAASGYISYALTMGWYRQAPGKEREFVASIGRGGNTYYADSVKGRFTISRDNAKNTVYLQMNSLKPEDTAVYYCAAVLRLIRHVYWGQGTQVTVSS

SEQ ID NO: 37679 - protein, 118 aa, Artificial Sequence
  Chemically Synthesized
QVQLQESGGGLVQAGGSLRLSCAASGNIFYTGIMGWYRQAPGKERELVATIGPGSTTYYADSVKGRFTISRDNAKNTVYLQMNSLKPEDTAVYYCAARGWWPIDLDYWGQGTQVTVSS

SEQ ID NO: 37680 - protein, 122 aa, Artificial Sequence
  Chemically Synthesized
QVQLQESGGGLVQAGGSLRLSCAASGSISRYVGMGWYRQAPGKEREFVATIGNGTSTYYADSVKGRFTISRDNAKNTVYLQMNSLKPEDTAVYYCAVRGIYRPHYWSRFSYWGQGTQVTVSS

SEQ ID NO: 37681 - protein, 121 aa, Artificial Sequence
  Chemically Synthesized
QVQLQESGGGLVQAGGSLRLSCAASGTISRNGFMGWYRQAPGKERELVASIAWGANTYYADSVKGRFTISRDNAKNTVYLQMNSLKPEDTAVYYCAARYYWQLLIVTSMYWGQGTQVTVSS

SEQ ID NO: 37682 - protein, 124 aa, Artificial Sequence
  Chemically Synthesized
QVQLQESGGGLVQAGGSLRLSCAASGYISHKFMGWYRQAPGKERELVAGIGYGATTYYADSVKGRFTISRDNAKNTVYLQMNSLKPEDTAVYYCAAGGWSSLFRNCTVVLTMYWGQGTQVTVSS

SEQ ID NO: 37683 - protein, 122 aa, Artificial Sequence
  Chemically Synthesized
QVQLQESGGGLVQAGGSLRLSCAASGSISISYIMGWYRQAPGKERELVAGINGGSTTYYADSVKGRFTISRDNAKNTVYLQMNSLKPEDTAVYYCAAEHRRNYSDAIWLPYWGQGTQVTVSS

SEQ ID NO: 37684 - protein, 118 aa, Artificial Sequence
  Chemically Synthesized
QVQLQESGGGLVQAGGSLRLSCAASGNIFVYWAMGWYRQAPGKERELVATIAYGSSTNYADSVKGRFTISRDNAKNTVYLQMNSLKPEDTAVYYCAVVRNGWEWHAYWGQGTQVTVSS

SEQ ID NO: 37685 - protein, 118 aa, Artificial Sequence
  Chemically Synthesized
QVQLQESGGGLVQAGGSLRLSCAASGTISFDQYMGWYRQAPGKEREFVATIGEGSTTNYADSVKGRFTISRDNAKNTVYLQMNSLKPEDTAVYYCAVLSHDNYWYRYWGQGTQVTVSS

SEQ ID NO: 37686 - protein, 122 aa, Artificial Sequence
  Chemically Synthesized
QVQLQESGGGLVQAGGSLRLSCAASGNISAYNVMGWYRQAPGKEREFVAGIDTGGSTYYADSVKGRFTISRDNAKNTVYLQMNSLKPEDTAVYYCAVSIGYETRYVAGFSYWGQGTQVTVSS

SEQ ID NO: 37687 - protein, 122 aa, Artificial Sequence
  Chemically Synthesized
QVQLQESGGGLVQAGGSLRLSCAASGSISLVIAMGWYRQAPGKEREFVAGIGRGGSTYYADSVKGRFTISRDNAKNTVYLQMNSLKPEDTAVYYCAASTHARYDPVYYLTYWGQGTQVTVSS

SEQ ID NO: 37688 - protein, 118 aa, Artificial Sequence
  Chemically Synthesized
QVQLQESGGGLVQAGGSLRLSCAASGNISYVRWMGWYRQAPGKERELVAGIGVGGITNYADSVKGRFTISRDNAKNTVYLQMNSLKPEDTAVYYCAATDVDWILYRYWGQGTQVTVSS

SEQ ID NO: 37689 - protein, 122 aa, Artificial Sequence
  Chemically Synthesized
QVQLQESGGGLVQAGGSLRLSCAASGTISLLEYMGWYRQAPGKEREFVAAITGGSSTNYADSVKGRFTISRDNAKNTVYLQMNSLKPEDTAVYYCAASLVPYDKDNLFFGYWGQGTQVTVSS

SEQ ID NO: 37690 - protein, 122 aa, Artificial Sequence
  Chemically Synthesized
QVQLQESGGGLVQAGGSLRLSCAASGTISVVQDMGWYRQAPGKERELVAGIAKGGNTYYADSVKGRFTISRDNAKNTVYLQMNSLKPEDTAVYYCAASPIPFSYAYPAYHYWGQGTQVTVSS

SEQ ID NO: 37691 - protein, 118 aa, Artificial Sequence
  Chemically Synthesized
QVQLQESGGGLVQAGGSLRLSCAASGNISVIDAMGWYRQAPGKERELVAAIDRGTSTYYADSVKGRFTISRDNAKNTVYLQMNSLKPEDTAVYYCAAEDASLYALLYWGQGTQVTVSS

SEQ ID NO: 37692 - protein, 118 aa, Artificial Sequence
  Chemically Synthesized
QVQLQESGGGLVQAGGSLRLSCAASGTISQGSNMGWYRQAPGKEREFVASIGSGTNTNYADSVKGRFTISRDNAKNTVYLQMNSLKPEDTAVYYCAALIVRKGWYYYWGQGTQVTVSS

SEQ ID NO: 37693 - protein, 118 aa, Artificial Sequence
  Chemically Synthesized
QVQLQESGGGLVQAGGSLRLSCAASGTISLRGYMGWYRQAPGKEREFVAAITDGATTYYADSVKGRFTISRDNAKNTVYLQMNSLKPEDTAVYYCAAWYEDDVSYDYWGQGTQVTVSS

SEQ ID NO: 37694 - protein, 121 aa, Artificial Sequence
  Chemically Synthesized
QVQLQESGGGLVQAGGSLRLSCAASGSISTWTSMGWYRQAPGKEREFVATISVVVLPYADSVKGRFTISRDNAKNTVYLQMNSLKPEDTAVYYCAAFLYRYVSDGANHLYWGQGTQVTVSS

SEQ ID NO: 37695 - protein, 126 aa, Artificial Sequence
  Chemically Synthesized
QVQLQESGGGLVQAGGSLRLSCAASGNISSPYYMGWYRQAPGKERELVAGISGGSTTYYADSVKGRFTISRDNAKNTVYLQMNSLKPEDTAVYYCAVFPYILWVWPFDTSDVLGYWGQGTQVTVSS

SEQ ID NO: 37696 - protein, 119 aa, Artificial Sequence
  Chemically Synthesized
QVQLQESGGGLVQAGGSLRLSCAASGSIFDLDFMGWYRQAPGKEREFVASIGGTTYADSVKGRFTISRDNAKNTVYLQMNSLKPEDTAVYYCAVETIDNDVYYRGHDYWGQGTQVTVSS

SEQ ID NO: 37697 - protein, 117 aa, Artificial Sequence
  Chemically Synthesized
QVQLQESGGGLVQAGGSLRLSCAASGNIFHVFMGWYRQAPGKERELVAAIALGTITNYADSVKGRFTISRDNAKNTVYLQMNSLKPEDTAVYYCAAFGTTDDAHPYWGQGTQVTVSS

SEQ ID NO: 37698 - protein, 118 aa, Artificial Sequence
  Chemically Synthesized
QVQLQESGGGLVQAGGSLRLSCAASGTISLAWYMGWYRQAPGKERELVAAIATGAITYYADSVKGRFTISRDNAKNTVYLQMNSLKPEDTAVYYCAANTVAPDDHWYWGQGTQVTVSS

SEQ ID NO: 37699 - protein, 110 aa, Artificial Sequence
  Chemically Synthesized
QVQLQESGGGLVQAGGSLRLSCAASGTISYYTTMGWYRQAPGKEREFVASITGGGSTNYADSVKGRFTISRDNAKNTVYLQMNSLKPEDTAVYYCAVFYWGQGTQVTVSS

SEQ ID NO: 37700 - protein, 122 aa, Artificial Sequence
  Chemically Synthesized
QVQLQESGGGLVQAGGSLRLSCAASGYISQGSVMGWYRQAPGKEREFVAAIGAGGNTNYADSVKGRFTISRDNAKNTVYLQMNSLKPEDTAVYYCAAVYYGRHDLRRYLYYWGQGTQVTVSS

SEQ ID NO: 37701 - protein, 118 aa, Artificial Sequence
  Chemically Synthesized
QVQLQESGGGLVQAGGSLRLSCAASGNISQIVTMGWYRQAPGKERELVAGITYGGNTNYADSVKGRFTISRDNAKNTVYLQMNSLKPEDTAVYYCAAAGGYFILFAYWGQGTQVTVSS

SEQ ID NO: 37702 - protein, 125 aa, Artificial Sequence
  Chemically Synthesized
QVQLQESGGGLVQAGGSLRLSCAASGTISYRGDMGWYRQAPGKERELVAGISPGGITNYADSVKGRFTISRDNAKNTVYLQMNSLKPEDTAVYYCAAIGDDINWDYIDTRVSFYWGQGTQVTVSS

SEQ ID NO: 37703 - protein, 125 aa, Artificial Sequence
  Chemically Synthesized
QVQLQESGGGLVQAGGSLRLSCAASGTISYLQRMGWYRQAPGKERELVAAIGLGLLPYADSVKGRFTISRDNAKNTVYLQMNSLKPEDTAVYYCAAAATDSVVTWYYSGYRYYYWGQGTQVTVSS

SEQ ID NO: 37704 - protein, 110 aa, Artificial Sequence
  Chemically Synthesized
QVQLQESGGGLVQAGGSLRLSCAASGYISGPGLMGWYRQAPGKEREFVASIGYGGNTYYADSVKGRFTISRDNAKNTVYLQMNSLKPEDTAVYYCALYYWGQGTQVTVSS

SEQ ID NO: 37705 - protein, 126 aa, Artificial Sequence
  Chemically Synthesized
QVQLQESGGGLVQAGGSLRLSCAASGYISSHGVMGWYRQAPGKEREFVASITPWYYYQYADSVKGRFTISRDNAKNTVYLQMNSLKPEDTAVYYCAVFIRATFYGYQGLPSGSCYWGQGTQVTVSS

SEQ ID NO: 37706 - protein, 120 aa, Artificial Sequence
  Chemically Synthesized
QVQLQESGGGLVQAGGSLRLSCAASGSISDGRAMGWYRQAPGKERELVAGEGTTTYYADSVKGRFTISRDNAKNTVYLQMNSLKPEDTAVYYCAVVAPRFESIFGTYEYWGQGTQVTVSS

SEQ ID NO: 37707 - protein, 121 aa, Artificial Sequence
  Chemically Synthesized
QVQLQESGGGLVQAGGSLRLSCAASGSIFGDIPMGWYRQAPGKERELVAAITVGGTTNYADSVKGRFTISRDNAKNTVYLQMNSLKPEDTAVYYCAFLVGVGGTTSSFIYWGQGTQVTVSS

SEQ ID NO: 37708 - protein, 115 aa, Artificial Sequence
  Chemically Synthesized
QVQLQESGGGLVQAGGSLRLSCAASGNISYAWYMGWYRQAPGKERELVAGINDGASTNYADSVKGRFTISRDNAKNTVYLQMNSLKPEDTAVYYCALSTTTTVYWGQGTQVTVSS

SEQ ID NO: 37709 - protein, 122 aa, Artificial Sequence
  Chemically Synthesized
QVQLQESGGGLVQAGGSLRLSCAASGNIFHDYFMGWYRQAPGKERELVATINVGTTTNYADSVKGRFTISRDNAKNTVYLQMNSLKPEDTAVYYCAAGTGDYGLQYRALRYWGQGTQVTVSS

SEQ ID NO: 37710 - protein, 118 aa, Artificial Sequence
  Chemically Synthesized
QVQLQESGGGLVQAGGSLRLSCAASGTISVDIYMGWYRQAPGKEREFVAGIGTGTSTYYADSVKGRFTISRDNAKNTVYLQMNSLKPEDTAVYYCAVAFDVQPHHSYWGQGTQVTVSS

SEQ ID NO: 37711 - protein, 118 aa, Artificial Sequence
  Chemically Synthesized
QVQLQESGGGLVQAGGSLRLSCAASGTIFPSAYMGWYRQAPGKERELVATISGGSSTYYADSVKGRFTISRDNAKNTVYLQMNSLKPEDTAVYYCAVRDSDYWALHYWGQGTQVTVSS

SEQ ID NO: 37712 - protein, 118 aa, Artificial Sequence
  Chemically Synthesized
QVQLQESGGGLVQAGGSLRLSCAASGNIFYDDGMGWYRQAPGKEREFVASINEGTTTYYADSVKGRFTISRDNAKNTVYLQMNSLKPEDTAVYYCAVGASYGSVLAYWGQGTQVTVSS

SEQ ID NO: 37713 - protein, 118 aa, Artificial Sequence
  Chemically Synthesized
QVQLQESGGGLVQAGGSLRLSCAASGNISTWLYMGWYRQAPGKERELVAGIAPGASTYYADSVKGRFTISRDNAKNTVYLQMNSLKPEDTAVYYCAADLGGFDTYDYWGQGTQVTVSS

SEQ ID NO: 37714 - protein, 122 aa, Artificial Sequence
  Chemically Synthesized
QVQLQESGGGLVQAGGSLRLSCAASGNISPSDYMGWYRQAPGKERELVASINTGTITYYADSVKGRFTISRDNAKNTVYLQMNSLKPEDTAVYYCAADNVIDRYDPYGLPYWGQGTQVTVSS

SEQ ID NO: 37715 - protein, 118 aa, Artificial Sequence
  Chemically Synthesized
QVQLQESGGGLVQAGGSLRLSCAASGYIFVGAYMGWYRQAPGKEREFVASISGGTSTYYADSVKGRFTISRDNAKNTVYLQMNSLKPEDTAVYYCAVRVAVPRHHLYWGQGTQVTVSS

SEQ ID NO: 37716 - protein, 122 aa, Artificial Sequence
  Chemically Synthesized
QVQLQESGGGLVQAGGSLRLSCAASGYISPSFSMGWYRQAPGKERELVASINAGATTNYADSVKGRFTISRDNAKNTVYLQMNSLKPEDTAVYYCAADYTGDHQDDRDYPYWGQGTQVTVSS

SEQ ID NO: 37717 - protein, 117 aa, Artificial Sequence
  Chemically Synthesized
QVQLQESGGGLVQAGGSLRLSCAASGTIFDIVDMGWYRQAPGKERELVAAIDGGSTTNYADSVKGRFTISRDNAKNTVYLQMNSLKPEDTAVYYCAVKVALESFFYWGQGTQVTVSS

SEQ ID NO: 37718 - protein, 122 aa, Artificial Sequence
  Chemically Synthesized
QVQLQESGGGLVQAGGSLRLSCAASGNIFPLIYMGWYRQAPGKEREFVASIDTGGNTNYADSVKGRFTISRDNAKNTVYLQMNSLKPEDTAVYYCAVIAFDDASRSGYLYYWGQGTQVTVSS

SEQ ID NO: 37719 - protein, 118 aa, Artificial Sequence
  Chemically Synthesized
QVQLQESGGGLVQAGGSLRLSCAASGTIFWLGVMGWYRQAPGKEREFVATIGYGAITNYADSVKGRFTISRDNAKNTVYLQMNSLKPEDTAVYYCAADTAPYYVHGYWGQGTQVTVSS

SEQ ID NO: 37720 - protein, 118 aa, Artificial Sequence
  Chemically Synthesized
QVQLQESGGGLVQAGGSLRLSCAASGSISDYRYMGWYRQAPGKERELVASIDYGGTTNYADSVKGRFTISRDNAKNTVYLQMNSLKPEDTAVYYCAAIDDPLHRYAYWGQGTQVTVSS

SEQ ID NO: 37721 - protein, 117 aa, Artificial Sequence
  Chemically Synthesized
QVQLQESGGGLVQAGGSLRLSCAASGYIFYTSVMGWYRQAPGKEREFVASIDWGTNTYADSVKGRFTISRDNAKNTVYLQMNSLKPEDTAVYYCAAVHQDVSAHYYWGQGTQVTVSS

SEQ ID NO: 37722 - protein, 122 aa, Artificial Sequence
  Chemically Synthesized
QVQLQESGGGLVQAGGSLRLSCAASGSISAGYSMGWYRQAPGKERELVASITTGTNTNYADSVKGRFTISRDNAKNTVYLQMNSLKPEDTAVYYCAALETPQGADDADHGYWGQGTQVTVSS

SEQ ID NO: 37723 - protein, 118 aa, Artificial Sequence
  Chemically Synthesized
QVQLQESGGGLVQAGGSLRLSCAASGTISDEWLMGWYRQAPGKEREFVAAISRGGITNYADSVKGRFTISRDNAKNTVYLQMNSLKPEDTAVYYCAVLQRRGTWHYYWGQGTQVTVSS

SEQ ID NO: 37724 - protein, 118 aa, Artificial Sequence
  Chemically Synthesized
QVQLQESGGGLVQAGGSLRLSCAASGSISTRYKMGWYRQAPGKEREFVATISDGTITNYADSVKGRFTISRDNAKNTVYLQMNSLKPEDTAVYYCAAYYYKTGHHYYWGQGTQVTVSS

SEQ ID NO: 37725 - protein, 118 aa, Artificial Sequence
  Chemically Synthesized
QVQLQESGGGLVQAGGSLRLSCAASGSISNSSGMGWYRQAPGKEREFVASIGAGTSTYYADSVKGRFTISRDNAKNTVYLQMNSLKPEDTAVYYCAVVYRTISYHWYWGQGTQVTVSS

SEQ ID NO: 37726 - protein, 117 aa, Artificial Sequence
  Chemically Synthesized
QVQLQESGGGLVQAGGSLRLSCAASGTIFNATMGWYRQAPGKEREFVAAITLGSTTYYADSVKGRFTISRDNAKNTVYLQMNSLKPEDTAVYYCAAPHIGRAPLGYWGQGTQVTVSS

SEQ ID NO: 37727 - protein, 126 aa, Artificial Sequence
  Chemically Synthesized
QVQLQESGGGLVQAGGSLRLSCAASGYISVDNDMGWYRQAPGKERELVAAISWGSSTNYADSVKGRFTISRDNAKNTVYLQMNSLKPEDTAVYYCAVFTDYHYDVVTLYPSRYRYWGQGTQVTVSS

SEQ ID NO: 37728 - protein, 118 aa, Artificial Sequence
  Chemically Synthesized
QVQLQESGGGLVQAGGSLRLSCAASGTISVPSTMGWYRQAPGKEREFVATIAYGSITYYADSVKGRFTISRDNAKNTVYLQMNSLKPEDTAVYYCAVDYTVGRSLAYWGQGTQVTVSS

SEQ ID NO: 37729 - protein, 115 aa, Artificial Sequence
  Chemically Synthesized
QVQLQESGGGLVQAGGSLRLSCAASGTISGVAIMGWYRQAPGKEREFVAAITYGSNTYYADSVKGRFTISRDNAKNTVYLQMNSLKPEDTAVYYCAVYWSDLYYWGQGTQVTVSS

SEQ ID NO: 37730 - protein, 118 aa, Artificial Sequence
  Chemically Synthesized
QVQLQESGGGLVQAGGSLRLSCAASGNISSTNGMGWYRQAPGKERELVASINFGGTTYYADSVKGRFTISRDNAKNTVYLQMNSLKPEDTAVYYCAVYQANGDSYDYWGQGTQVTVSS

SEQ ID NO: 37731 - protein, 118 aa, Artificial Sequence
  Chemically Synthesized
QVQLQESGGGLVQAGGSLRLSCAASGSISPYGYMGWYRQAPGKEREFVAAINAGGSTNYADSVKGRFTISRDNAKNTVYLQMNSLKPEDTAVYYCAVYNTYPGAYFYWGQGTQVTVSS

SEQ ID NO: 37732 - protein, 118 aa, Artificial Sequence
  Chemically Synthesized
QVQLQESGGGLVQAGGSLRLSCAASGTISDVWFMGWYRQAPGKERELVAAIGSGGNTYYADSVKGRFTISRDNAKNTVYLQMNSLKPEDTAVYYCAVVLYDTQQHYYWGQGTQVTVSS

SEQ ID NO: 37733 - protein, 126 aa, Artificial Sequence
  Chemically Synthesized
QVQLQESGGGLVQAGGSLRLSCAASGYISGDENMGWYRQAPGKERELVATIAPGTTTNYADSVKGRFTISRDNAKNTVYLQMNSLKPEDTAVYYCAVGVTGLEQYYYEPDDDYAYWGQGTQVTVSS

SEQ ID NO: 37734 - protein, 118 aa, Artificial Sequence
  Chemically Synthesized
QVQLQESGGGLVQAGGSLRLSCAASGYISSWYGMGWYRQAPGKERELVAGINSGANTYYADSVKGRFTISRDNAKNTVYLQMNSLKPEDTAVYYCAVYQDSEGTHAYWGQGTQVTVSS

SEQ ID NO: 37735 - protein, 122 aa, Artificial Sequence
  Chemically Synthesized
QVQLQESGGGLVQAGGSLRLSCAASGNISFQHTMGWYRQAPGKEREFVASIGAGTTTNYADSVKGRFTISRDNAKNTVYLQMNSLKPEDTAVYYCAARQAYSLDGAGQHEYWGQGTQVTVSS

SEQ ID NO: 37736 - protein, 122 aa, Artificial Sequence
  Chemically Synthesized
QVQLQESGGGLVQAGGSLRLSCAASGNISYSEQMGWYRQAPGKEREFVAGINVGGNTNYADSVKGRFTISRDNAKNTVYLQMNSLKPEDTAVYYCAAWGTLGPSRRTLHLYWGQGTQVTVSS

SEQ ID NO: 37737 - protein, 118 aa, Artificial Sequence
  Chemically Synthesized
QVQLQESGGGLVQAGGSLRLSCAASGNISRYAFMGWYRQAPGKERELVASIANGANTYYADSVKGRFTISRDNAKNTVYLQMNSLKPEDTAVYYCAVGQWYYRRHNYWGQGTQVTVSS

SEQ ID NO: 37738 - protein, 122 aa, Artificial Sequence
  Chemically Synthesized
QVQLQESGGGLVQAGGSLRLSCAASGNIFVGPIMGWYRQAPGKERELVAAIDSGATTYYADSVKGRFTISRDNAKNTVYLQMNSLKPEDTAVYYCAAHRRYPYGREDVHWYWGQGTQVTVSS

SEQ ID NO: 37739 - protein, 121 aa, Artificial Sequence
  Chemically Synthesized
QVQLQESGGGLVQAGGSLRLSCAASGTISNYYRMGWYRQAPGKEREFVAGITQGGITNYADSVKGRFTISRDNAKNTVYLQMNSLKPEDTAVYYCAAVLYKQYSGSYYGYWGQGTQVTVSS

SEQ ID NO: 37740 - protein, 118 aa, Artificial Sequence
  Chemically Synthesized
QVQLQESGGGLVQAGGSLRLSCAASGSIFFDTAMGWYRQAPGKEREFVASITTGGNTNYADSVKGRFTISRDNAKNTVYLQMNSLKPEDTAVYYCAAQSYLYDYYRYWGQGTQVTVSS

SEQ ID NO: 37741 - protein, 118 aa, Artificial Sequence
  Chemically Synthesized
QVQLQESGGGLVQAGGSLRLSCAASGTIFDDIFMGWYRQAPGKEREFVAGITPGGSTNYADSVKGRFTISRDNAKNTVYLQMNSLKPEDTAVYYCAAAGFPTWRHYYWGQGTQVTVSS

SEQ ID NO: 37742 - protein, 118 aa, Artificial Sequence
  Chemically Synthesized
QVQLQESGGGLVQAGGSLRLSCAASGTISYISYMGWYRQAPGKERELVAAISRGAITYYADSVKGRFTISRDNAKNTVYLQMNSLKPEDTAVYYCAVRNPGSREHDYWGQGTQVTVSS

SEQ ID NO: 37743 - protein, 118 aa, Artificial Sequence
  Chemically Synthesized
QVQLQESGGGLVQAGGSLRLSCAASGSISFATVMGWYRQAPGKERELVAGIGNGASTNYADSVKGRFTISRDNAKNTVYLQMNSLKPEDTAVYYCAVDVQDDRFLGYWGQGTQVTVSS

SEQ ID NO: 37744 - protein, 120 aa, Artificial Sequence
  Chemically Synthesized
QVQLQESGGGLVQAGGSLRLSCAASGYISESFMGWYRQAPGKERELVAAITLVLVPYADSVKGRFTISRDNAKNTVYLQMNSLKPEDTAVYYCAATADTYYRYTIYHDYWGQGTQVTVSS

SEQ ID NO: 37745 - protein, 125 aa, Artificial Sequence
  Chemically Synthesized
QVQLQESGGGLVQAGGSLRLSCAASGYISYLEYMGWYRQAPGKERELVAAITYGTTTNYADSVKGRFTISRDNAKNTVYLQMNSLKPEDTAVYYCAVSYLPYFDQLSFTITTIYWGQGTQVTVSS

SEQ ID NO: 37746 - protein, 118 aa, Artificial Sequence
  Chemically Synthesized
QVQLQESGGGLVQAGGSLRLSCAASGSISWPTYMGWYRQAPGKEREFVAAIGLGTTTNYADSVKGRFTISRDNAKNTVYLQMNSLKPEDTAVYYCAAVRKNPSYHGYWGQGTQVTVSS

SEQ ID NO: 37747 - protein, 122 aa, Artificial Sequence
  Chemically Synthesized
QVQLQESGGGLVQAGGSLRLSCAASGNISAADTMGWYRQAPGKERELVASITSVVLPYADSVKGRFTISRDNAKNTVYLQMNSLKPEDTAVYYCAAGTWHSTRRVPYDYGYWGQGTQVTVSS

SEQ ID NO: 37748 - protein, 118 aa, Artificial Sequence
  Chemically Synthesized
QVQLQESGGGLVQAGGSLRLSCAASGTISNPARMGWYRQAPGKERELVAGIAAGSSTYYADSVKGRFTISRDNAKNTVYLQMNSLKPEDTAVYYCAVIAYYESWHYYWGQGTQVTVSS

SEQ ID NO: 37749 - protein, 118 aa, Artificial Sequence
  Chemically Synthesized
QVQLQESGGGLVQAGGSLRLSCAASGYISDTRFMGWYRQAPGKEREFVASISVGATTNYADSVKGRFTISRDNAKNTVYLQMNSLKPEDTAVYYCAADLRTTLDYDYWGQGTQVTVSS

SEQ ID NO: 37750 - protein, 118 aa, Artificial Sequence
  Chemically Synthesized
QVQLQESGGGLVQAGGSLRLSCAASGNISAWADMGWYRQAPGKEREFVAAISGGGTTNYADSVKGRFTISRDNAKNTVYLQMNSLKPEDTAVYYCAAAVGIDDNFPYWGQGTQVTVSS

SEQ ID NO: 37751 - protein, 118 aa, Artificial Sequence
  Chemically Synthesized
QVQLQESGGGLVQAGGSLRLSCAASGNISQYYGMGWYRQAPGKEREFVAAISGGGSTYYADSVKGRFTISRDNAKNTVYLQMNSLKPEDTAVYYCAAVGHGRSSFYYWGQGTQVTVSS

SEQ ID NO: 37752 - protein, 118 aa, Artificial Sequence
  Chemically Synthesized
QVQLQESGGGLVQAGGSLRLSCAASGTISHIRAMGWYRQAPGKEREFVATINDGASTNYADSVKGRFTISRDNAKNTVYLQMNSLKPEDTAVYYCAVYSYPTYHHYYWGQGTQVTVSS

SEQ ID NO: 37753 - protein, 118 aa, Artificial Sequence
  Chemically Synthesized
QVQLQESGGGLVQAGGSLRLSCAASGYISEVSGMGWYRQAPGKEREFVATIGDGASTYYADSVKGRFTISRDNAKNTVYLQMNSLKPEDTAVYYCAVVSTIDYNHTYWGQGTQVTVSS

SEQ ID NO: 37754 - protein, 118 aa, Artificial Sequence
  Chemically Synthesized
QVQLQESGGGLVQAGGSLRLSCAASGTISRQYWMGWYRQAPGKEREFVATITSGGITNYADSVKGRFTISRDNAKNTVYLQMNSLKPEDTAVYYCAVVQRFDTYLYYWGQGTQVTVSS

SEQ ID NO: 37755 - protein, 121 aa, Artificial Sequence
  Chemically Synthesized
QVQLQESGGGLVQAGGSLRLSCAASGTIFITSMGWYRQAPGKEREFVAGIDYGGSTNYADSVKGRFTISRDNAKNTVYLQMNSLKPEDTAVYYCAADFYRSDPAAVGHYYWGQGTQVTVSS

SEQ ID NO: 37756 - protein, 118 aa, Artificial Sequence
  Chemically Synthesized
QVQLQESGGGLVQAGGSLRLSCAASGYISAWRYMGWYRQAPGKERELVAGITVGSTTNYADSVKGRFTISRDNAKNTVYLQMNSLKPEDTAVYYCAALWKRINWHYYWGQGTQVTVSS

SEQ ID NO: 37757 - protein, 117 aa, Artificial Sequence
  Chemically Synthesized
QVQLQESGGGLVQAGGSLRLSCAASGYISRYNMGWYRQAPGKERELVATIATGGNTYYADSVKGRFTISRDNAKNTVYLQMNSLKPEDTAVYYCAAGITGDRNYVYWGQGTQVTVSS

SEQ ID NO: 37758 - protein, 110 aa, Artificial Sequence
  Chemically Synthesized
QVQLQESGGGLVQAGGSLRLSCAASGTIFNTSYMGWYRQAPGKEREFVAGIGTVLVPYADSVKGRFTISRDNAKNTVYLQMNSLKPEDTAVYYCAANMYWGQGTQVTVSS

SEQ ID NO: 37759 - protein, 121 aa, Artificial Sequence
  Chemically Synthesized
QVQLQESGGGLVQAGGSLRLSCAASGNISGEPYMGWYRQAPGKERELVAAISYGGNTNYADSVKGRFTISRDNAKNTVYLQMNSLKPEDTAVYYCALSYEPSNTDWDHLYWGQGTQVTVSS

SEQ ID NO: 37760 - protein, 118 aa, Artificial Sequence
  Chemically Synthesized
QVQLQESGGGLVQAGGSLRLSCAASGYISPLIVMGWYRQAPGKERELVASITRGGTTYYADSVKGRFTISRDNAKNTVYLQMNSLKPEDTAVYYCAAGDLYLDGHSYWGQGTQVTVSS

SEQ ID NO: 37761 - protein, 121 aa, Artificial Sequence
  Chemically Synthesized
QVQLQESGGGLVQAGGSLRLSCAASGNISKLYDMGWYRQAPGKERELVATITSVLLPYADSVKGRFTISRDNAKNTVYLQMNSLKPEDTAVYYCAVRFGDVAPDHDYYAYWGQGTQVTVSS

SEQ ID NO: 37762 - protein, 122 aa, Artificial Sequence
  Chemically Synthesized
QVQLQESGGGLVQAGGSLRLSCAASGNISTYQYMGWYRQAPGKERELVASITGGATTNYADSVKGRFTISRDNAKNTVYLQMNSLKPEDTAVYYCAAYRPIEGGHGTLLFYWGQGTQVTVSS

SEQ ID NO: 37763 - protein, 122 aa, Artificial Sequence
  Chemically Synthesized
QVQLQESGGGLVQAGGSLRLSCAASGTISVLRYMGWYRQAPGKEREFVAAIDDGTSTNYADSVKGRFTISRDNAKNTVYLQMNSLKPEDTAVYYCAALRLGNGYRDRYHPYWGQGTQVTVSS

SEQ ID NO: 37764 - protein, 122 aa, Artificial Sequence
  Chemically Synthesized
QVQLQESGGGLVQAGGSLRLSCAASGNISTYRDMGWYRQAPGKEREFVASIGAGANTNYADSVKGRFTISRDNAKNTVYLQMNSLKPEDTAVYYCAAPPTYNDKYRDDYSYWGQGTQVTVSS

SEQ ID NO: 37765 - protein, 118 aa, Artificial Sequence
  Chemically Synthesized
QVQLQESGGGLVQAGGSLRLSCAASGTIFLYRDMGWYRQAPGKEREFVAGINDGTSTYYADSVKGRFTISRDNAKNTVYLQMNSLKPEDTAVYYCAVDVGIYPYHYYWGQGTQVTVSS

SEQ ID NO: 37766 - protein, 126 aa, Artificial Sequence
  Chemically Synthesized
QVQLQESGGGLVQAGGSLRLSCAASGSISAFPYMGWYRQAPGKEREFVAGIGSGGSTNYADSVKGRFTISRDNAKNTVYLQMNSLKPEDTAVYYCAASSAALKDPHYTTSTDHQYWGQGTQVTVSS

SEQ ID NO: 37767 - protein, 113 aa, Artificial Sequence
  Chemically Synthesized
QVQLQESGGGLVQAGGSLRLSCAASGTIFGQVPMGWYRQAPGKEREFVAGITVGGITYYADSVKGRFTISRDNAKNTVYLQMNSLKPEDTAVYYCAVDRYGYWGQGTQVTVSS

SEQ ID NO: 37768 - protein, 118 aa, Artificial Sequence
  Chemically Synthesized
QVQLQESGGGLVQAGGSLRLSCAASGSISDPSTMGWYRQAPGKERELVAGINPGTNTNYADSVKGRFTISRDNAKNTVYLQMNSLKPEDTAVYYCAVYGIRPVYLRYWGQGTQVTVSS

SEQ ID NO: 37769 - protein, 124 aa, Artificial Sequence
  Chemically Synthesized
QVQLQESGGGLVQAGGSLRLSCAASGTIFAYDYMGWYRQAPGKEREFVASIADGATTYYADSVKGRFTISRDNAKNTVYLQMNSLKPEDTAVYYCARDYHVFGWYYTDKRPLYWGQGTQVTVSS

SEQ ID NO: 37770 - protein, 126 aa, Artificial Sequence
  Chemically Synthesized
QVQLQESGGGLVQAGGSLRLSCAASGNIFFPAAMGWYRQAPGKERELVASISTGANTNYADSVKGRFTISRDNAKNTVYLQMNSLKPEDTAVYYCAVLYIVDDDRDYSYSRYLYYWGQGTQVTVSS

SEQ ID NO: 37771 - protein, 118 aa, Artificial Sequence
  Chemically Synthesized
QVQLQESGGGLVQAGGSLRLSCAASGSISRWTYMGWYRQAPGKEREFVASIGDGANTNYADSVKGRFTISRDNAKNTVYLQMNSLKPEDTAVYYCAVGSYYVYYFKYWGQGTQVTVSS

SEQ ID NO: 37772 - protein, 125 aa, Artificial Sequence
  Chemically Synthesized
QVQLQESGGGLVQAGGSLRLSCAASGYISTYIGMGWYRQAPGKERELVATITNGGTTYYADSVKGRFTISRDNAKNTVYLQMNSLKPEDTAVYYCAVVPLRGAIYPGLDNPIHYWGQGTQVTVSS

SEQ ID NO: 37773 - protein, 118 aa, Artificial Sequence
  Chemically Synthesized
QVQLQESGGGLVQAGGSLRLSCAASGNISHKDVMGWYRQAPGKEREFVAAISPGGITNYADSVKGRFTISRDNAKNTVYLQMNSLKPEDTAVYYCAAVTSSRSILGYWGQGTQVTVSS

SEQ ID NO: 37774 - protein, 118 aa, Artificial Sequence
  Chemically Synthesized
QVQLQESGGGLVQAGGSLRLSCAASGSISYSYGMGWYRQAPGKERELVATIADGGSTYYADSVKGRFTISRDNAKNTVYLQMNSLKPEDTAVYYCAVVTGRDQWLPYWGQGTQVTVSS

SEQ ID NO: 37775 - protein, 126 aa, Artificial Sequence
  Chemically Synthesized
QVQLQESGGGLVQAGGSLRLSCAASGNIFQDVNMGWYRQAPGKERELVAAIGAGTTTNYADSVKGRFTISRDNAKNTVYLQMNSLKPEDTAVYYCAAPYDYVRYTYGWHTFLHTYWGQGTQVTVSS

SEQ ID NO: 37776 - protein, 118 aa, Artificial Sequence
  Chemically Synthesized
QVQLQESGGGLVQAGGSLRLSCAASGNISATVRMGWYRQAPGKEREFVAGIDKGATTNYADSVKGRFTISRDNAKNTVYLQMNSLKPEDTAVYYCAALYYRSGYFYYWGQGTQVTVSS

SEQ ID NO: 37777 - protein, 122 aa, Artificial Sequence
  Chemically Synthesized
QVQLQESGGGLVQAGGSLRLSCAASGNISDEYNMGWYRQAPGKEREFVATIAYGTTTYYADSVKGRFTISRDNAKNTVYLQMNSLKPEDTAVYYCAVLDDDRFVVHTDHRYWGQGTQVTVSS

SEQ ID NO: 37778 - protein, 122 aa, Artificial Sequence
  Chemically Synthesized
QVQLQESGGGLVQAGGSLRLSCAASGTIFDDSLMGWYRQAPGKERELVASINFGSITNYADSVKGRFTISRDNAKNTVYLQMNSLKPEDTAVYYCAARITGEIGNWDDFDYWGQGTQVTVSS

SEQ ID NO: 37779 - protein, 126 aa, Artificial Sequence
  Chemically Synthesized
QVQLQESGGGLVQAGGSLRLSCAASGNISDRLRMGWYRQAPGKEREFVAGITIGATTYYADSVKGRFTISRDNAKNTVYLQMNSLKPEDTAVYYCAVSQGGGERLYYAHPTNYGYWGQGTQVTVSS

SEQ ID NO: 37780 - protein, 111 aa, Artificial Sequence
  Chemically Synthesized
QVQLQESGGGLVQAGGSLRLSCAASGTIFPDVGMGWYRQAPGKERELVATIADGGTTYYADSVKGRFTISRDNAKNTVYLQMNSLKPEDTAVYYCAPHYYWGQGTQVTVSS

SEQ ID NO: 37781 - protein, 118 aa, Artificial Sequence
  Chemically Synthesized
QVQLQESGGGLVQAGGSLRLSCAASGTIFDYLEMGWYRQAPGKERELVASINYGGSTYYADSVKGRFTISRDNAKNTVYLQMNSLKPEDTAVYYCAAYERQNIKHVYWGQGTQVTVSS

SEQ ID NO: 37782 - protein, 118 aa, Artificial Sequence
  Chemically Synthesized
QVQLQESGGGLVQAGGSLRLSCAASGYISTRALMGWYRQAPGKEREFVAAISTGGNTYYADSVKGRFTISRDNAKNTVYLQMNSLKPEDTAVYYCAAVPWRQRRLPYWGQGTQVTVSS

SEQ ID NO: 37783 - protein, 121 aa, Artificial Sequence
  Chemically Synthesized
QVQLQESGGGLVQAGGSLRLSCAASGSISYFDDMGWYRQAPGKERELVATISLGSTTNYADSVKGRFTISRDNAKNTVYLQMNSLKPEDTAVYYCAAVTLTVTTVTGLLYWGQGTQVTVSS

SEQ ID NO: 37784 - protein, 122 aa, Artificial Sequence
  Chemically Synthesized
QVQLQESGGGLVQAGGSLRLSCAASGTIFPAKRMGWYRQAPGKERELVAGIDAGTSTNYADSVKGRFTISRDNAKNTVYLQMNSLKPEDTAVYYCAALYATTGGRPAWLGYWGQGTQVTVSS

SEQ ID NO: 37785 - protein, 122 aa, Artificial Sequence
  Chemically Synthesized
QVQLQESGGGLVQAGGSLRLSCAASGYISQHDRMGWYRQAPGKEREFVAAIAAGSSTNYADSVKGRFTISRDNAKNTVYLQMNSLKPEDTAVYYCAAVIITWQTQPKYHYYWGQGTQVTVSS

SEQ ID NO: 37786 - protein, 118 aa, Artificial Sequence
  Chemically Synthesized
QVQLQESGGGLVQAGGSLRLSCAASGSIFSYLYMGWYRQAPGKERELVAAIGYGGITNYADSVKGRFTISRDNAKNTVYLQMNSLKPEDTAVYYCAVGLWYGDPYHYWGQGTQVTVSS

SEQ ID NO: 37787 - protein, 117 aa, Artificial Sequence
  Chemically Synthesized
QVQLQESGGGLVQAGGSLRLSCAASGTISSVTMGWYRQAPGKEREFVASIDAGGSTYYADSVKGRFTISRDNAKNTVYLQMNSLKPEDTAVYYCAAYQYAGLSYGYWGQGTQVTVSS

SEQ ID NO: 37788 - protein, 125 aa, Artificial Sequence
  Chemically Synthesized
QVQLQESGGGLVQAGGSLRLSCAASGTIFQPTDMGWYRQAPGKEREFVAGITYGSSTYADSVKGRFTISRDNAKNTVYLQMNSLKPEDTAVYYCAVQRNSLPSLGDPFSGRHVYWGQGTQVTVSS

SEQ ID NO: 37789 - protein, 118 aa, Artificial Sequence
  Chemically Synthesized
QVQLQESGGGLVQAGGSLRLSCAASGTISGFYYMGWYRQAPGKERELVATIGPGTNTNYADSVKGRFTISRDNAKNTVYLQMNSLKPEDTAVYYCAAAHYTAYWHYYWGQGTQVTVSS

SEQ ID NO: 37790 - protein, 122 aa, Artificial Sequence
  Chemically Synthesized
QVQLQESGGGLVQAGGSLRLSCAASGNIFAIWYMGWYRQAPGKERELVAGISSGTITYYADSVKGRFTISRDNAKNTVYLQMNSLKPEDTAVYYCAAVIANSHDFTYYYDYWGQGTQVTVSS

SEQ ID NO: 37791 - protein, 117 aa, Artificial Sequence
  Chemically Synthesized
QVQLQESGGGLVQAGGSLRLSCAASGNISTAPVMGWYRQAPGKEREFVAGIGTGTNTNYADSVKGRFTISRDNAKNTVYLQMNSLKPEDTAVYYCAAYYRGEAHDYWGQGTQVTVSS

SEQ ID NO: 37792 - protein, 118 aa, Artificial Sequence
  Chemically Synthesized
QVQLQESGGGLVQAGGSLRLSCAASGNIFLKWVMGWYRQAPGKEREFVAAINNGGNTNYADSVKGRFTISRDNAKNTVYLQMNSLKPEDTAVYYCAAVVWDGYHLDYWGQGTQVTVSS

SEQ ID NO: 37793 - protein, 119 aa, Artificial Sequence
  Chemically Synthesized
QVQLQESGGGLVQAGGSLRLSCAASGSISDSRPVMGWYRQAPGKEREFVAGISEGTSTYYADSVKGRFTISRDNAKNTVYLQMNSLKPEDTAVYYCAAEYRYNDYFTYWGQGTQVTVSS

SEQ ID NO: 37794 - protein, 117 aa, Artificial Sequence
  Chemically Synthesized
QVQLQESGGGLVQAGGSLRLSCAASGTISLPYVMGWYRQAPGKEREFVAAIGWGATTNYADSVKGRFTISRDNAKNTVYLQMNSLKPEDTAVYYCAAYYGGDDHDYWGQGTQVTVSS

SEQ ID NO: 37795 - protein, 117 aa, Artificial Sequence
  Chemically Synthesized
QVQLQESGGGLVQAGGSLRLSCAASGNISEPYLMGWYRQAPGKEREFVAAIAAGSNTNYADSVKGRFTISRDNAKNTVYLQMNSLKPEDTAVYYCAAYWHYSYHDYWGQGTQVTVSS

SEQ ID NO: 37796 - protein, 108 aa, Artificial Sequence
  Chemically Synthesized
QVQLQESGGGLVQAGGSLRLSCAASGTISYAVMGWYRQAPGKERELVAGIANGTITYYADSVKGRFTISRDNAKNTVYLQMNSLKPEDTAVYYCAMYWGQGTQVTVSS

SEQ ID NO: 37797 - protein, 117 aa, Artificial Sequence
  Chemically Synthesized
QVQLQESGGGLVQAGGSLRLSCAASGSISQPYIMGWYRQAPGKEREFVAAIAIGGSTNYADSVKGRFTISRDNAKNTVYLQMNSLKPEDTAVYYCAAYYLHRSHDYWGQGTQVTVSS

SEQ ID NO: 37798 - protein, 126 aa, Artificial Sequence
  Chemically Synthesized
QVQLQESGGGLVQAGGSLRLSCAASGYIFGIAHMGWYRQAPGKEREFVAGIDYGSNTNYADSVKGRFTISRDNAKNTVYLQMNSLKPEDTAVYYCAVLDERFTVPDTIYGYKYDYWGQGTQVTVSS

SEQ ID NO: 37799 - protein, 118 aa, Artificial Sequence
  Chemically Synthesized
QVQLQESGGGLVQAGGSLRLSCAASGSIFWPHIMGWYRQAPGKEREFVAAIDRGANTNYADSVKGRFTISRDNAKNTVYLQMNSLKPEDTAVYYCAADRKYRLFFGYWGQGTQVTVSS

SEQ ID NO: 37800 - protein, 118 aa, Artificial Sequence
  Chemically Synthesized
QVQLQESGGGLVQAGGSLRLSCAASGTISYASFMGWYRQAPGKEREFVAAINSGGNTYYADSVKGRFTISRDNAKNTVYLQMNSLKPEDTAVYYCAVYRRRYLGLDYWGQGTQVTVSS

SEQ ID NO: 37801 - protein, 121 aa, Artificial Sequence
  Chemically Synthesized
QVQLQESGGGLVQAGGSLRLSCAASGTISFVFDMGWYRQAPGKERELVATIDTVLIPYADSVKGRFTISRDNAKNTVYLQMNSLKPEDTAVYYCAAAPYTRYTDTSGHGYWGQGTQVTVSS

SEQ ID NO: 37802 - protein, 122 aa, Artificial Sequence
  Chemically Synthesized
QVQLQESGGGLVQAGGSLRLSCAASGTISVQRTMGWYRQAPGKEREFVATITIGANTYYADSVKGRFTISRDNAKNTVYLQMNSLKPEDTAVYYCAVAYPFTGDYRRFLPYWGQGTQVTVSS

SEQ ID NO: 37803 - protein, 109 aa, Artificial Sequence
  Chemically Synthesized
QVQLQESGGGLVQAGGSLRLSCAASGTISLHRGMGWYRQAPGKERELVATMLTVLVPYADSVKGRFTISRDNAKNTVYLQMNSLKPEDTAVYYCAAFYWGQGTQVTVSS

SEQ ID NO: 37804 - protein, 117 aa, Artificial Sequence
  Chemically Synthesized
QVQLQESGGGLVQAGGSLRLSCAASGTIFSLTMGWYRQAPGKEREFVATIDTGSITNYADSVKGRFTISRDNAKNTVYLQMNSLKPEDTAVYYCAVDYGYGSAFRYWGQGTQVTVSS

SEQ ID NO: 37805 - protein, 118 aa, Artificial Sequence
  Chemically Synthesized
QVQLQESGGGLVQAGGSLRLSCAASGSIFRYAIMGWYRQAPGKERELVAAINTGASTYYADSVKGRFTISRDNAKNTVYLQMNSLKPEDTAVYYCAVARNYVSRHIYWGQGTQVTVSS

SEQ ID NO: 37806 - protein, 117 aa, Artificial Sequence
  Chemically Synthesized
QVQLQESGGGLVQAGGSLRLSCAASGNISGYHMGWYRQAPGKERELVASIGHGATTNYADSVKGRFTISRDNAKNTVYLQMNSLKPEDTAVYYCAVSPATYLDYDYWGQGTQVTVSS

SEQ ID NO: 37807 - protein, 122 aa, Artificial Sequence
  Chemically Synthesized
QVQLQESGGGLVQAGGSLRLSCAASGTISGRDGMGWYRQAPGKERELVAGINHGTNTNYADSVKGRFTISRDNAKNTVYLQMNSLKPEDTAVYYCAVTPYALDDGVDVHAYWGQGTQVTVSS

SEQ ID NO: 37808 - protein, 118 aa, Artificial Sequence
  Chemically Synthesized
QVQLQESGGGLVQAGGSLRLSCAASGTISQWIDMGWYRQAPGKERELVASISEGSITNYADSVKGRFTISRDNAKNTVYLQMNSLKPEDTAVYYCAAYDNGRSAFDYWGQGTQVTVSS

SEQ ID NO: 37809 - protein, 122 aa, Artificial Sequence
  Chemically Synthesized
QVQLQESGGGLVQAGGSLRLSCAASGTISTYVYMGWYRQAPGKERELVAGIAGGSTTNYADSVKGRFTISRDNAKNTVYLQMNSLKPEDTAVYYCAVVDDVLKASYWCLSYWGQGTQVTVSS

SEQ ID NO: 37810 - protein, 118 aa, Artificial Sequence
  Chemically Synthesized
QVQLQESGGGLVQAGGSLRLSCAASGTISTWYAMGWYRQAPGKEREFVAAIALGGSTYYADSVKGRFTISRDNAKNTVYLQMNSLKPEDTAVYYCAANTNTERAHLYWGQGTQVTVSS

SEQ ID NO: 37811 - protein, 117 aa, Artificial Sequence
  Chemically Synthesized
QVQLQESGGGLVQAGGSLRLSCAASGTIFTVLIMGWYRQAPGKERELVAGITDGGSTYYADSVKGRFTISRDNAKNTVYLQMNSLKPEDTAVYYCAASYYKLFTIYWGQGTQVTVSS

SEQ ID NO: 37812 - protein, 126 aa, Artificial Sequence
  Chemically Synthesized
QVQLQESGGGLVQAGGSLRLSCAASGYIFRQWAMGWYRQAPGKEREFVAAITRGATTNYADSVKGRFTISRDNAKNTVYLQMNSLKPEDTAVYYCAAYAGSDSYTADTYRPGYRYWGQGTQVTVSS

SEQ ID NO: 37813 - protein, 118 aa, Artificial Sequence
  Chemically Synthesized
QVQLQESGGGLVQAGGSLRLSCAASGSIFGWGYMGWYRQAPGKEREFVAGINIGSITYYADSVKGRFTISRDNAKNTVYLQMNSLKPEDTAVYYCAVYGRIARRHQYWGQGTQVTVSS

SEQ ID NO: 37814 - protein, 118 aa, Artificial Sequence
  Chemically Synthesized
QVQLQESGGGLVQAGGSLRLSCAASGTISRPYLMGWYRQAPGKERELVATITLGGTTNYADSVKGRFTISRDNAKNTVYLQMNSLKPEDTAVYYCAVRDVYFLSHQYWGQGTQVTVSS

SEQ ID NO: 37815 - protein, 118 aa, Artificial Sequence
  Chemically Synthesized
QVQLQESGGGLVQAGGSLRLSCAASGNISYPWYMGWYRQAPGKERELVATITGGGTTYYADSVKGRFTISRDNAKNTVYLQMNSLKPEDTAVYYCAVWIAAELHLYYWGQGTQVTVSS

SEQ ID NO: 37816 - protein, 120 aa, Artificial Sequence
  Chemically Synthesized
QVQLQESGGGLVQAGGSLRLSCAASGSILVTLMGWYRQAPGKERELVASIAGGATTYYADSVKGRFTISRDNAKNTVYLQMNSLKPEDTAVYYCAAPPGQYGGGIEHSYWGQGTQVTVSS

SEQ ID NO: 37817 - protein, 122 aa, Artificial Sequence
  Chemically Synthesized
QVQLQESGGGLVQAGGSLRLSCAASGSISYGLYMGWYRQAPGKERELVAGITDGSTTYYADSVKGRFTISRDNAKNTVYLQMNSLKPEDTAVYYCAVQWAYRYILYIYHIYWGQGTQVTVSS

SEQ ID NO: 37818 - protein, 126 aa, Artificial Sequence
  Chemically Synthesized
QVQLQESGGGLVQAGGSLRLSCAASGNISSTNAMGWYRQAPGKEREFVATIAHGAITNYADSVKGRFTISRDNAKNTVYLQMNSLKPEDTAVYYCAASNGAFTFYSGLYVLYHTYWGQGTQVTVSS

SEQ ID NO: 37819 - protein, 118 aa, Artificial Sequence
  Chemically Synthesized
QVQLQESGGGLVQAGGSLRLSCAASGTIFDQLYMGWYRQAPGKEREFVATIDAGASTNYADSVKGRFTISRDNAKNTVYLQMNSLKPEDTAVYYCAAELRYYSYYGYWGQGTQVTVSS

SEQ ID NO: 37820 - protein, 126 aa, Artificial Sequence
  Chemically Synthesized
QVQLQESGGGLVQAGGSLRLSCAASGNISGYDIMGWYRQAPGKEREFVATIAYGANTYYADSVKGRFTISRDNAKNTVYLQMNSLKPEDTAVYYCAAGDSWDVGYYSHTGVRLQYWGQGTQVTVSS

SEQ ID NO: 37821 - protein, 125 aa, Artificial Sequence
  Chemically Synthesized
QVQLQESGGGLVQAGGSLRLSCAASGSISSGYQMGWYRQAPGKERELVATIGDGSSTYYADSVKGRFTISRDNAKNTVYLQMNSLKPEDTAVYYCAVQTDQEHYWDSVMLTTIYWGQGTQVTVSS

SEQ ID NO: 37822 - protein, 118 aa, Artificial Sequence
  Chemically Synthesized
QVQLQESGGGLVQAGGSLRLSCAASGYISHPADMGWYRQAPGKERELVATITYGGITYYADSVKGRFTISRDNAKNTVYLQMNSLKPEDTAVYYCAAYREADVWLQYWGQGTQVTVSS

SEQ ID NO: 37823 - protein, 117 aa, Artificial Sequence
  Chemically Synthesized
QVQLQESGGGLVQAGGSLRLSCAASGNISSLTMGWYRQAPGKERELVATIAGGGTTNYADSVKGRFTISRDNAKNTVYLQMNSLKPEDTAVYYCAVQWHQTLVLVYWGQGTQVTVSS

SEQ ID NO: 37824 - protein, 113 aa, Artificial Sequence
  Chemically Synthesized
QVQLQESGGGLVQAGGSLRLSCAASGSISIYQYMGWYRQAPGKEREFVAGIAWGSTTYYADSVKGRFTISRDNAKNTVYLQMNSLKPEDTAVYYCAAYYHDYWGQGTQVTVSS

SEQ ID NO: 37825 - protein, 127 aa, Artificial Sequence
  Chemically Synthesized
QVQLQESGGGLVQAGGSLRLSCAASGSIFRTNIMGWYRQAPGKEREFVAGIGFGAITNYADSVKGRFTISRDNAKNTVYLQMNSLKPEDTAVYYCAVYWTDDLQRTRDGPADGHSYWGQGTQVTVSS

SEQ ID NO: 37826 - protein, 122 aa, Artificial Sequence
  Chemically Synthesized
QVQLQESGGGLVQAGGSLRLSCAASGTISGSYTMGWYRQAPGKEREFVASITSGTSTYYADSVKGRFTISRDNAKNTVYLQMNSLKPEDTAVYYCAVWGYAYDVDYSYYQYWGQGTQVTVSS

SEQ ID NO: 37827 - protein, 118 aa, Artificial Sequence
  Chemically Synthesized
QVQLQESGGGLVQAGGSLRLSCAASGSIFYTAYMGWYRQAPGKERELVASISVGSNYLYADSVKGRFTISRDNAKNTVYLQMNSLKPEDTAVYYCAARLDSYDVYRYWGQGTQVTVSS

SEQ ID NO: 37828 - protein, 122 aa, Artificial Sequence
  Chemically Synthesized
QVQLQESGGGLVQAGGSLRLSCAASGYIFYRVQMGWYRQAPGKEREFVAGIAQGGITNYADSVKGRFTISRDNAKNTVYLQMNSLKPEDTAVYYCAVGYSDGQGLAAELRYWGQGTQVTVSS

SEQ ID NO: 37829 - protein, 122 aa, Artificial Sequence
  Chemically Synthesized
QVQLQESGGGLVQAGGSLRLSCAASGNIFYRYTMGWYRQAPGKEREFVASIDRGTITYYADSVKGRFTISRDNAKNTVYLQMNSLKPEDTAVYYCAVLDYPYRVAYQYHYYWGQGTQVTVSS

SEQ ID NO: 37830 - protein, 122 aa, Artificial Sequence
  Chemically Synthesized
QVQLQESGGGLVQAGGSLRLSCAASGTIFGDYIMGWYRQAPGKERELVAGIDYGATTYYADSVKGRFTISRDNAKNTVYLQMNSLKPEDTAVYYCAADDDWYDDYYPGYIYWGQGTQVTVSS

SEQ ID NO: 37831 - protein, 122 aa, Artificial Sequence
  Chemically Synthesized
QVQLQESGGGLVQAGGSLRLSCAASGYISSWGAMGWYRQAPGKEREFVATIDAGGTTNYADSVKGRFTISRDNAKNTVYLQMNSLKPEDTAVYYCAAIIVSHGYYAVTYHYWGQGTQVTVSS

SEQ ID NO: 37832 - protein, 111 aa, Artificial Sequence
  Chemically Synthesized
QVQLQESGGGLVQAGGSLRLSCAASGTIFGEDVMGWYRQAPGKEREFVAAIADGSITNYADSVKGRFTISRDNAKNTVYLQMNSLKPEDTAVYYCAVRMYWGQGTQVTVSS

SEQ ID NO: 37833 - protein, 125 aa, Artificial Sequence
  Chemically Synthesized
QVQLQESGGGLVQAGGSLRLSCAASGNISVYNAMGWYRQAPGKERELVAAIAYVVIPYADSVKGRFTISRDNAKNTVYLQMNSLKPEDTAVYYCAVIRRRYNDLTSAFYSQHFYWGQGTQVTVSS

SEQ ID NO: 37834 - protein, 116 aa, Artificial Sequence
  Chemically Synthesized
QVQLQESGGGLVQAGGSLRLSCAASGNIFQSVMGWYRQAPGKERELVAAIAPGANTYYADSVKGRFTISRDNAKNTVYLQMNSLKPEDTAVYYCAAALSKVCTIYWGQGTQVTVSS

SEQ ID NO: 37835 - protein, 119 aa, Artificial Sequence
  Chemically Synthesized
QVQLQESGGGLVQAGGSLRLSCAASGSISLGDYMGWYRQAPGKERELVAAIDGGASTYYADSVKGRFTISRDNAKNTVYLQMNSLKPEDTAVYYCAAIYVDVRRDLDYWGQGTQVTVSS

SEQ ID NO: 37836 - protein, 122 aa, Artificial Sequence
  Chemically Synthesized
QVQLQESGGGLVQAGGSLRLSCAASGSISDGYAMGWYRQAPGKEREFVAGIDQGTTTYYADSVKGRFTISRDNAKNTVYLQMNSLKPEDTAVYYCAAFFRRSAGSQALYGYWGQGTQVTVSS

SEQ ID NO: 37837 - protein, 118 aa, Artificial Sequence
  Chemically Synthesized
QVQLQESGGGLVQAGGSLRLSCAASGSISDGYAMGWYRQAPGKEREFVAGIDQGTTTYYADSVKGRFTISRDNAKNTVYLQMNSLKPEDTAVYYCAAFDYSGKRHSYWGQGTQVTVSS

SEQ ID NO: 37838 - protein, 119 aa, Artificial Sequence
  Chemically Synthesized
QVQLQESGGGLVQAGGSLRLSCAASGSIFDSIIMGWYRQAPGKERELVAAIDKGSSTYYADSVKGRFTISRDNAKNTVYLQMNSLKPEDTAVYYCAAIYVDVRRDLDYWGQGTQVTVSS

SEQ ID NO: 37839 - protein, 118 aa, Artificial Sequence
  Chemically Synthesized
QVQLQESGGGLVQAGGSLRLSCAASGSISDGYAMGWYRQAPGKEREFVAGIDQGTTTYYADSVKGRFTISRDNAKNTVYLQMNSLKPEDTAVYYCAAPRDYHGDHYYWGQGTQVTVSS

SEQ ID NO: 37840 - protein, 118 aa, Artificial Sequence
  Chemically Synthesized
QVQLQESGGGLVQAGGSLRLSCAASGSISDGYAMGWYRQAPGKEREFVAGIDQGTTTYYADSVKGRFTISRDNAKNTVYLQMNSLKPEDTAVYYCAAFDRDVRRLSYWGQGTQVTVSS

SEQ ID NO: 37841 - protein, 118 aa, Artificial Sequence
  Chemically Synthesized
QVQLQESGGGLVQAGGSLRLSCAASGSISDGYAMGWYRQAPGKEREFVAGIDQGTTTYYADSVKGRFTISRDNAKNTVYLQMNSLKPEDTAVYYCAAKLNDQFRFVYWGQGTQVTVSS

SEQ ID NO: 37842 - protein, 119 aa, Artificial Sequence
  Chemically Synthesized
QVQLQESGGGLVQAGGSLRLSCAASGNIFPPLYMGWYRQAPGKERELVAAIGLGSSTYYADSVKGRFTISRDNAKNTVYLQMNSLKPEDTAVYYCAAIYVDVRRDLDYWGQGTQVTVSS

SEQ ID NO: 37843 - protein, 118 aa, Artificial Sequence
  Chemically Synthesized
QVQLQESGGGLVQAGGSLRLSCAASGSISDGYAMGWYRQAPGKEREFVAGIDQGTTTYYADSVKGRFTISRDNAKNTVYLQMNSLKPEDTAVYYCAARWAPDRVYYYWGQGTQVTVSS

SEQ ID NO: 37844 - protein, 119 aa, Artificial Sequence
  Chemically Synthesized
QVQLQESGGGLVQAGGSLRLSCAASGTISSGVVMGWYRQAPGKERELVAAINRGATTYYADSVKGRFTISRDNAKNTVYLQMNSLKPEDTAVYYCAAIYVDVRRDLDYWGQGTQVTVSS

SEQ ID NO: 37845 - protein, 119 aa, Artificial Sequence
  Chemically Synthesized
QVQLQESGGGLVQAGGSLRLSCAASGYIFAGNYMGWYRQAPGKERELVAAIDRGSSTYYADSVKGRFTISRDNAKNTVYLQMNSLKPEDTAVYYCAAIYVDVRRDLDYWGQGTQVTVSS

SEQ ID NO: 37846 - protein, 118 aa, Artificial Sequence
  Chemically Synthesized
QVQLQESGGGLVQAGGSLRLSCAASGSISDGYAMGWYRQAPGKEREFVAGIDQGTTTYYADSVKGRFTISRDNAKNTVYLQMNSLKPEDTAVYYCAAYVQYQGWLTYWGQGTQVTVSS

SEQ ID NO: 37847 - protein, 119 aa, Artificial Sequence
  Chemically Synthesized
QVQLQESGGGLVQAGGSLRLSCAASGTISHPWVMGWYRQAPGKERELVAAIARGGNTYYADSVKGRFTISRDNAKNTVYLQMNSLKPEDTAVYYCAAIYVDVRRDLDYWGQGTQVTVSS

SEQ ID NO: 37848 - protein, 119 aa, Artificial Sequence
  Chemically Synthesized
QVQLQESGGGLVQAGGSLRLSCAASGNIFARYVMGWYRQAPGKERELVAAIDTGSITYYADSVKGRFTISRDNAKNTVYLQMNSLKPEDTAVYYCAAIYVDVRRDLDYWGQGTQVTVSS

SEQ ID NO: 37849 - protein, 118 aa, Artificial Sequence
  Chemically Synthesized
QVQLQESGGGLVQAGGSLRLSCAASGSISDGYAMGWYRQAPGKEREFVAGIDQGTTTYYADSVKGRFTISRDNAKNTVYLQMNSLKPEDTAVYYCAADRVPWSYHYYWGQGTQVTVSS

SEQ ID NO: 37850 - protein, 119 aa, Artificial Sequence
  Chemically Synthesized
QVQLQESGGGLVQAGGSLRLSCAASGTISGYYPMGWYRQAPGKEREFVAAIDLGGTTYYADSVKGRFTISRDNAKNTVYLQMNSLKPEDTAVYYCAAIYVDVRRDLDYWGQGTQVTVSS

SEQ ID NO: 37851 - protein, 113 aa, Artificial Sequence
  Chemically Synthesized
QVQLQESGGGLVQAGGSLRLSCAASGTRMGWYRQAPGKERELVASINDGTNTNYADSVKGRFTISRDNAKNTVYLQMNSLKPEDTAVYYCAADYSAYDSHVYWGQGTQVTVSS

SEQ ID NO: 37852 - protein, 121 aa, Artificial Sequence
  Chemically Synthesized
QVQLQESGGGLVQAGGSLRLSCAASGYISGDGYMGWYRQAPGKEREFVAGITYGSNTYYADSVKGRFTISRDNAKNTVYLQMNSLKPEDTAVYYCAVWLDYYERPIGYVYWGQGTQVTVSS

SEQ ID NO: 37853 - protein, 126 aa, Artificial Sequence
  Chemically Synthesized
QVQLQESGGGLVQAGGSLRLSCAASGNISVDLVMGWYRQAPGKERELVAAINHGSSTYYADSVKGRFTISRDNAKNTVYLQMNSLKPEDTAVYYCAAYGGFTSLYDTNKPDLHVYWGQGTQVTVSS

SEQ ID NO: 37854 - protein, 118 aa, Artificial Sequence
  Chemically Synthesized
QVQLQESGGGLVQAGGSLRLSCAASGYIFIKFVMGWYRQAPGKEREFVASITYGSTTYYADSVKGRFTISRDNAKNTVYLQMNSLKPEDTAVYYCAVEVVDRLPYYYWGQGTQVTVSS

SEQ ID NO: 37855 - protein, 111 aa, Artificial Sequence
  Chemically Synthesized
QVQLQESGGGLVQAGGSLRLSCAASGTIFSVSYMGWYRQAPGKEREFVAAINEGTSTYYADSVKGRFTISRDNAKNTVYLQMNSLKPEDTAVYYCAALIYWGQGTQVTVSS

SEQ ID NO: 37856 - protein, 118 aa, Artificial Sequence
  Chemically Synthesized
QVQLQESGGGLVQAGGSLRLSCAASGSISVLSDMGWYRQAPGKERELVAGISDGTNTYYADSVKGRFTISRDNAKNTVYLQMNSLKPEDTAVYYCAVYLAHHFRLYYWGQGTQVTVSS

SEQ ID NO: 37857 - protein, 118 aa, Artificial Sequence
  Chemically Synthesized
QVQLQESGGGLVQAGGSLRLSCAASGSIFGDRYMGWYRQAPGKERELVASINYGASTYYADSVKGRFTISRDNAKNTVYLQMNSLKPEDTAVYYCAVDVRSDAFTRYWGQGTQVTVSS

SEQ ID NO: 37858 - protein, 118 aa, Artificial Sequence
  Chemically Synthesized
QVQLQESGGGLVQAGGSLRLSCAASGNIFAPNNMGWYRQAPGKEREPLLVTVVLPYADSVKGRFTISRDNAKNTVYLQMNSLKPEDTAVYYCAAYEYPFETFGESMYWGQGTQVTVSS

SEQ ID NO: 37859 - protein, 122 aa, Artificial Sequence
  Chemically Synthesized
QVQLQESGGGLVQAGGSLRLSCAASGSIFLITYMGWYRQAPGKERELVAAISYGGNTYYADSVKGRFTISRDNAKNTVYLQMNSLKPEDTAVYYCAAQGTYKTSYRRRHGYWGQGTQVTVSS

SEQ ID NO: 37860 - protein, 118 aa, Artificial Sequence
  Chemically Synthesized
QVQLQESGGGLVQAGGSLRLSCAASGYIFNTSFMGWYRQAPGKEREFVAGISYGGSTNYADSVKGRFTISRDNAKNTVYLQMNSLKPEDTAVYYCAVTAYQRQGHDYWGQGTQVTVSS

SEQ ID NO: 37861 - protein, 122 aa, Artificial Sequence
  Chemically Synthesized
QVQLQESGGGLVQAGGSLRLSCAASGYISGRYGMGWYRQAPGKERELVATIGDGSSTYYADSVKGRFTISRDNAKNTVYLQMNSLKPEDTAVYYCAVYDGDYRYHVDEYAYWGQGTQVTVSS

SEQ ID NO: 37862 - protein, 121 aa, Artificial Sequence
  Chemically Synthesized
QVQLQESGGGLVQAGGSLRLSCAASGNISYNGAMGWYRQAPGKEREFVASISDGASTNYADSVKGRFTISRDNAKNTVYLQMNSLKPEDTAVYYCAFTVLTNTLVTTLMYWGQGTQVTVSS

SEQ ID NO: 37863 - protein, 118 aa, Artificial Sequence
  Chemically Synthesized
QVQLQESGGGLVQAGGSLRLSCAASGTISDIAGMGWYRQAPGKEREFVAGIDKGSSTNYADSVKGRFTISRDNAKNTVYLQMNSLKPEDTAVYYCAVRYYQADRFAYWGQGTQVTVSS

SEQ ID NO: 37864 - protein, 118 aa, Artificial Sequence
  Chemically Synthesized
QVQLQESGGGLVQAGGSLRLSCAASGYIFRQGFMGWYRQAPGKERELVAGINTGSNTNYADSVKGRFTISRDNAKNTVYLQMNSLKPEDTAVYYCAVYDYSYSSYYYWGQGTQVTVSS

SEQ ID NO: 37865 - protein, 121 aa, Artificial Sequence
  Chemically Synthesized
QVQLQESGGGLVQAGGSLRLSCAASGNILVLTMGWYRQAPGKEREFVAGIGVGSTTYYADSVKGRFTISRDNAKNTVYLQMNSLKPEDTAVYYCAAQSYPSDWDNYAHNYWGQGTQVTVSS

SEQ ID NO: 37866 - protein, 118 aa, Artificial Sequence
  Chemically Synthesized
QVQLQESGGGLVQAGGSLRLSCAASGNISAYWSMGWYRQAPGKERELVAAIAYGASTNYADSVKGRFTISRDNAKNTVYLQMNSLKPEDTAVYYCAAVTYESGHYAYWGQGTQVTVSS

SEQ ID NO: 37867 - protein, 117 aa, Artificial Sequence
  Chemically Synthesized
QVQLQESGGGLVQAGGSLRLSCAASGSISTRTMGWYRQAPGKERELVAAIGPGGSTYYADSVKGRFTISRDNAKNTVYLQMNSLKPEDTAVYYCAVYVSTATALGYWGQGTQVTVSS

SEQ ID NO: 37868 - protein, 118 aa, Artificial Sequence
  Chemically Synthesized
QVQLQESGGGLVQAGGSLRLSCAASGTISTDVYMGWYRQAPGKERELVASIDAGGNTYYADSVKGRFTISRDNAKNTVYLQMNSLKPEDTAVYYCAAVIADPFSLGYWGQGTQVTVSS

SEQ ID NO: 37869 - protein, 118 aa, Artificial Sequence
  Chemically Synthesized
QVQLQESGGGLVQAGGSLRLSCAASGTIFLLLMGWYRQAPGKERELVAAINYGANTYYADSVKGRFTISRDNAKNTVYLQMNSLKPEDTAVYYCAVYDQGARETFSYWGQGTQVTVSS

SEQ ID NO: 37870 - protein, 122 aa, Artificial Sequence
  Chemically Synthesized
QVQLQESGGGLVQAGGSLRLSCAASGYIFVKRYMGWYRQAPGKEREFVASITGGGITNYADSVKGRFTISRDNAKNTVYLQMNSLKPEDTAVYYCAVPEGRTYYEYPPFGYWGQGTQVTVSS

SEQ ID NO: 37871 - protein, 118 aa, Artificial Sequence
  Chemically Synthesized
QVQLQESGGGLVQAGGSLRLSCAASGTIFADWYMGWYRQAPGKERELVASITKGGNTYYADSVKGRFTISRDNAKNTVYLQMNSLKPEDTAVYYCAAGGEDNHKFYYWGQGTQVTVSS

SEQ ID NO: 37872 - protein, 116 aa, Artificial Sequence
  Chemically Synthesized
QVQLQESGGGLVQAGGSLRLSCAASGSISTRMGWYRQAPGKEREFVAGIDQGGITNYADSVKGRFTISRDNAKNTVYLQMNSLKPEDTAVYYCAVTTNPGARYTYWGQGTQVTVSS

SEQ ID NO: 37873 - protein, 118 aa, Artificial Sequence
  Chemically Synthesized
QVQLQESGGGLVQAGGSLRLSCAASGTIFYPAEMGWYRQAPGKEREFVAGIARGASTNYADSVKGRFTISRDNAKNTVYLQMNSLKPEDTAVYYCAVYYIEDNDHSYWGQGTQVTVSS

SEQ ID NO: 37874 - protein, 122 aa, Artificial Sequence
  Chemically Synthesized
QVQLQESGGGLVQAGGSLRLSCAASGTISPDDRMGWYRQAPGKERELVAGIDLGAITNYADSVKGRFTISRDNAKNTVYLQMNSLKPEDTAVYYCAVPYQRAYNGYLYFDYWGQGTQVTVSS

SEQ ID NO: 37875 - protein, 118 aa, Artificial Sequence
  Chemically Synthesized
QVQLQESGGGLVQAGGSLRLSCAASGTISGRYAMGWYRQAPGKERELVATISGGTITYYADSVKGRFTISRDNAKNTVYLQMNSLKPEDTAVYYCAVVDDRDRTLLYWGQGTQVTVSS

SEQ ID NO: 37876 - protein, 122 aa, Artificial Sequence
  Chemically Synthesized
QVQLQESGGGLVQAGGSLRLSCAASGYISDVYGMGWYRQAPGKERELVATIDVGGNTYYADSVKGRFTISRDNAKNTVYLQMNSLKPEDTAVYYCAVGRDVGGEYWSDHSYWGQGTQVTVSS

SEQ ID NO: 37877 - protein, 118 aa, Artificial Sequence
  Chemically Synthesized
QVQLQESGGGLVQAGGSLRLSCAASGYISYIDYMGWYRQAPGKERELVAAIADGATTNYADSVKGRFTISRDNAKNTVYLQMNSLKPEDTAVYYCAVYYYYAYSYPYWGQGTQVTVSS

SEQ ID NO: 37878 - protein, 118 aa, Artificial Sequence
  Chemically Synthesized
QVQLQESGGGLVQAGGSLRLSCAASGYISYYITMGWYRQAPGKEREFVAGIAHGGNTYYADSVKGRFTISRDNAKNTVYLQMNSLKPEDTAVYYCAADYYNDGGFYYWGQGTQVTVSS

SEQ ID NO: 37879 - protein, 122 aa, Artificial Sequence
  Chemically Synthesized
QVQLQESGGGLVQAGGSLRLSCAASGSIFYYYNMGWYRQAPGKEREFVATIDDGASTNYADSVKGRFTISRDNAKNTVYLQMNSLKPEDTAVYYCAVYQPATSYDIRRFDYWGQGTQVTVSS

SEQ ID NO: 37880 - protein, 118 aa, Artificial Sequence
  Chemically Synthesized
QVQLQESGGGLVQAGGSLRLSCAASGNIFSTWDMGWYRQAPGKERELVATISAGASTNYADSVKGRFTISRDNAKNTVYLQMNSLKPEDTAVYYCAVIYDVRYRHWYWGQGTQVTVSS

SEQ ID NO: 37881 - protein, 122 aa, Artificial Sequence
  Chemically Synthesized
QVQLQESGGGLVQAGGSLRLSCAASGTISVVAVMGWYRQAPGKEREFVATIAYGATTNYADSVKGRFTISRDNAKNTVYLQMNSLKPEDTAVYYCAAVPYIDDIHYDDHRYWGQGTQVTVSS

SEQ ID NO: 37882 - protein, 122 aa, Artificial Sequence
  Chemically Synthesized
QVQLQESGGGLVQAGGSLRLSCAASGNISQHAWMGWYRQAPGKEREFVASIDTGSNTYYADSVKGRFTISRDNAKNTVYLQMNSLKPEDTAVYYCAAYQYWDGEVYGNHLYWGQGTQVTVSS

SEQ ID NO: 37883 - protein, 126 aa, Artificial Sequence
  Chemically Synthesized
QVQLQESGGGLVQAGGSLRLSCAASGTISPAYIMGWYRQAPGKERELVASISNGGITYYADSVKGRFTISRDNAKNTVYLQMNSLKPEDTAVYYCAAIHGVDDYTNPGGIEQLVYWGQGTQVTVSS

SEQ ID NO: 37884 - protein, 126 aa, Artificial Sequence
  Chemically Synthesized
QVQLQESGGGLVQAGGSLRLSCAASGSISPYYYMGWYRQAPGKEREFVASIAYGGNTYYADSVKGRFTISRDNAKNTVYLQMNSLKPEDTAVYYCAVQSGLTDDLVARRDDYYEYWGQGTQVTVSS

SEQ ID NO: 37885 - protein, 118 aa, Artificial Sequence
  Chemically Synthesized
QVQLQESGGGLVQAGGSLRLSCAASGYISGYRRMGWYRQAPGKERELVASIGLGGTTNYADSVKGRFTISRDNAKNTVYLQMNSLKPEDTAVYYCAVYTYDEQRFDYWGQGTQVTVSS

SEQ ID NO: 37886 - protein, 124 aa, Artificial Sequence
  Chemically Synthesized
QVQLQESGGGLVQAGGSLRLSCAASGTISGDAYMGWYRQAPGKEREFVATISGGATTNYADSVKGRFTISRDNAKNTVYLQMNSLKPEDTAVYYCAVKRGPTRYHPDTDYHVYWGQGTQVTVSS

SEQ ID NO: 37887 - protein, 118 aa, Artificial Sequence
  Chemically Synthesized
QVQLQESGGGLVQAGGSLRLSCAASGTIFGPYGMGWYRQAPGKERELVATISYGTSTYYADSVKGRFTISRDNAKNTVYLQMNSLKPEDTAVYYCAARGYIVRYYAYWGQGTQVTVSS

SEQ ID NO: 37888 - protein, 118 aa, Artificial Sequence
  Chemically Synthesized
QVQLQESGGGLVQAGGSLRLSCAASGNISVYDSMGWYRQAPGKERELVAGIGSGTSTNYADSVKGRFTISRDNAKNTVYLQMNSLKPEDTAVYYCAVALPFGYPYDYWGQGTQVTVSS

SEQ ID NO: 37889 - protein, 121 aa, Artificial Sequence
  Chemically Synthesized
QVQLQESGGGLVQAGGSLRLSCAASGYIFRQTYMGWYRQAPGKERELVAAISGGSTTYYADSVKGRFTISRDNAKNTVYLQMNSLKPEDTAVYYCAVYRRFEAYRYIHDYWGQGTQVTVSS

SEQ ID NO: 37890 - protein, 118 aa, Artificial Sequence
  Chemically Synthesized
QVQLQESGGGLVQAGGSLRLSCAASGNIFYSADMGWYRQAPGKERELVAGITNGATTYYADSVKGRFTISRDNAKNTVYLQMNSLKPEDTAVYYCAVYGPDEPYHDYWGQGTQVTVSS

SEQ ID NO: 37891 - protein, 118 aa, Artificial Sequence
  Chemically Synthesized
QVQLQESGGGLVQAGGSLRLSCAASGSIFFGIDMGWYRQAPGKEREFVAAITYGSTTYYADSVKGRFTISRDNAKNTVYLQMNSLKPEDTAVYYCAAYTWRYGPHRYWGQGTQVTVSS

SEQ ID NO: 37892 - protein, 117 aa, Artificial Sequence
  Chemically Synthesized
QVQLQESGGGLVQAGGSLRLSCAASGSISDYDLMGWYRQAPGKEREFVASIGDGSNTYYADSVKGRFTISRDNAKNTVYLQMNSLKPEDTAVYYCAATKTTTLRIYWGQGTQVTVSS

SEQ ID NO: 37893 - protein, 122 aa, Artificial Sequence
  Chemically Synthesized
QVQLQESGGGLVQAGGSLRLSCAASGSISWQNSMGWYRQAPGKERELVAAISPGSTTYYADSVKGRFTISRDNAKNTVYLQMNSLKPEDTAVYYCAVAGRRYIQYGKAHYYWGQGTQVTVSS

SEQ ID NO: 37894 - protein, 126 aa, Artificial Sequence
  Chemically Synthesized
QVQLQESGGGLVQAGGSLRLSCAASGNISSYYYMGWYRQAPGKEREFVAAIAGGTITYYADSVKGRFTISRDNAKNTVYLQMNSLKPEDTAVYYCAATSDPVPVTWPYSRGYFAYWGQGTQVTVSS

SEQ ID NO: 37895 - protein, 118 aa, Artificial Sequence
  Chemically Synthesized
QVQLQESGGGLVQAGGSLRLSCAASGTISAPRIMGWYRQAPGKERELVAGIDYGTTTNYADSVKGRFTISRDNAKNTVYLQMNSLKPEDTAVYYCAVVYGGANVYEYWGQGTQVTVSS

SEQ ID NO: 37896 - protein, 126 aa, Artificial Sequence
  Chemically Synthesized
QVQLQESGGGLVQAGGSLRLSCAASGYISPYQAMGWYRQAPGKERELVASIDTGAITYYADSVKGRFTISRDNAKNTVYLQMNSLKPEDTAVYYCAVDDYARDGAAAVQQAGHYYWGQGTQVTVSS

SEQ ID NO: 37897 - protein, 118 aa, Artificial Sequence
  Chemically Synthesized
QVQLQESGGGLVQAGGSLRLSCAASGTISRYRGMGWYRQAPGKEREFVAAINKGGITNYADSVKGRFTISRDNAKNTVYLQMNSLKPEDTAVYYCAAYYVDGSYYFYWGQGTQVTVSS

SEQ ID NO: 37898 - protein, 122 aa, Artificial Sequence
  Chemically Synthesized
QVQLQESGGGLVQAGGSLRLSCAASGNIFVDEYMGWYRQAPGKERELVAGISVGTSTNYADSVKGRFTISRDNAKNTVYLQMNSLKPEDTAVYYCAAAGHPRNSYHDAHWYWGQGTQVTVSS

SEQ ID NO: 37899 - protein, 122 aa, Artificial Sequence
  Chemically Synthesized
QVQLQESGGGLVQAGGSLRLSCAASGSISENYKMGWYRQAPGKERELVAAINDGGNTNYADSVKGRFTISRDNAKNTVYLQMNSLKPEDTAVYYCAAVYRGYTGPTYWLGYWGQGTQVTVSS

SEQ ID NO: 37900 - protein, 118 aa, Artificial Sequence
  Chemically Synthesized
QVQLQESGGGLVQAGGSLRLSCAASGNIFREFHMGWYRQAPGKEREFVAAINPGGNTYYADSVKGRFTISRDNAKNTVYLQMNSLKPEDTAVYYCAALRKSPYNFYYWGQGTQVTVSS

SEQ ID NO: 37901 - protein, 125 aa, Artificial Sequence
  Chemically Synthesized
QVQLQESGGGLVQAGGSLRLSCAASGNIFTIRSMGWYRQAPGKEREFVAAITAGANTYYADSVKGRFTISRDNAKNTVYLQMNSLKPEDTAVYYCAAYGQESRTHEEPAYRHGYWGQGTQVTVSS

SEQ ID NO: 37902 - protein, 118 aa, Artificial Sequence
  Chemically Synthesized
QVQLQESGGGLVQAGGSLRLSCAASGNISSPEAMGWYRQAPGKEREFVATIGKGTSTNYADSVKGRFTISRDNAKNTVYLQMNSLKPEDTAVYYCAAYNYPYLAHYYWGQGTQVTVSS

SEQ ID NO: 37903 - protein, 118 aa, Artificial Sequence
  Chemically Synthesized
QVQLQESGGGLVQAGGSLRLSCAASGSISGYADMGWYRQAPGKEREFVAAIGYGAITNYADSVKGRFTISRDNAKNTVYLQMNSLKPEDTAVYYCAARYYNYGVHGYWGQGTQVTVSS

SEQ ID NO: 37904 - protein, 125 aa, Artificial Sequence
  Chemically Synthesized
QVQLQESGGGLVQAGGSLRLSCAASGSISTTYVMGWYRQAPGKEREFVAGITFGGNTNYADSVKGRFTISRDNAKNTVYLQMNSLKPEDTAVYYCAARDVYYLDYGSSLVVSFYWGQGTQVTVSS

SEQ ID NO: 37905 - protein, 118 aa, Artificial Sequence
  Chemically Synthesized
QVQLQESGGGLVQAGGSLRLSCAASGNISAKSIMGWYRQAPGKEREFVAAIDNGGTTNYADSVKGRFTISRDNAKNTVYLQMNSLKPEDTAVYYCAALFRLHTSHYYWGQGTQVTVSS

SEQ ID NO: 37906 - protein, 117 aa, Artificial Sequence
  Chemically Synthesized
QVQLQESGGGLVQAGGSLRLSCAASGTISAYPMGWYRQAPGKERELVAGIAAGGNTNYADSVKGRFTISRDNAKNTVYLQMNSLKPEDTAVYYCAVGVDTTYTYPYWGQGTQVTVSS

SEQ ID NO: 37907 - protein, 125 aa, Artificial Sequence
  Chemically Synthesized
QVQLQESGGGLVQAGGSLRLSCAASGKFLLLVMGWYRQAPGKERELVAAITPGGNTYYADSVKGRFTISRDNAKNTVYLQMNSLKPEDTAVYYCAVRWDYAYVYPHWDYAYLAYWGQGTQVTVSS

SEQ ID NO: 37908 - protein, 122 aa, Artificial Sequence
  Chemically Synthesized
QVQLQESGGGLVQAGGSLRLSCAASGNISGTLLMGWYRQAPGKEREFVAGISYGGSTNYADSVKGRFTISRDNAKNTVYLQMNSLKPEDTAVYYCAALSGARGQPSHGHYYWGQGTQVTVSS

SEQ ID NO: 37909 - protein, 122 aa, Artificial Sequence
  Chemically Synthesized
QVQLQESGGGLVQAGGSLRLSCAASGNISRPDVMGWYRQAPGKEREFVAAIASGSNTNYADSVKGRFTISRDNAKNTVYLQMNSLKPEDTAVYYCAADNTNPPEDWAQFVYWGQGTQVTVSS

SEQ ID NO: 37910 - protein, 118 aa, Artificial Sequence
  Chemically Synthesized
QVQLQESGGGLVQAGGSLRLSCAASGTISDAIRMGWYRQAPGKEREFVASINVGGITYYADSVKGRFTISRDNAKNTVYLQMNSLKPEDTAVYYCAAYGRPLVHYQYWGQGTQVTVSS

SEQ ID NO: 37911 - protein, 121 aa, Artificial Sequence
  Chemically Synthesized
QVQLQESGGGLVQAGGSLRLSCAASGYISGDPTMGWYRQAPGKEREFVASILGVLLPYADSVKGRFTISRDNAKNTVYLQMNSLKPEDTAVYYCAAYAIQSGYGWYRHLYWGQGTQVTVSS

SEQ ID NO: 37912 - protein, 117 aa, Artificial Sequence
  Chemically Synthesized
QVQLQESGGGLVQAGGSLRLSCAASGTISGHYYMGWYRQAPGKERELVAGINSVLIPYADSVKGRFTISRDNAKNTVYLQMNSLKPEDTAVYYCAADAHSDELYRYWGQGTQVTVSS

SEQ ID NO: 37913 - protein, 112 aa, Artificial Sequence
  Chemically Synthesized
QVQLQESGGGLVQAGGSLRLSCAASGLMGWYRQAPGKERELVATISEGSSTNYADSVKGRFTISRDNAKNTVYLQMNSLKPEDTAVYYCAVPDQYVPDHDYWGQGTQVTVSS

SEQ ID NO: 37914 - protein, 118 aa, Artificial Sequence
  Chemically Synthesized
QVQLQESGGGLVQAGGSLRLSCAASGTISATLRMGWYRQAPGKERELVAGIGVGSNTNYADSVKGRFTISRDNAKNTVYLQMNSLKPEDTAVYYCAATHTYTIYHDYWGQGTQVTVSS

SEQ ID NO: 37915 - protein, 117 aa, Artificial Sequence
  Chemically Synthesized
QVQLQESGGGLVQAGGSLRLSCAASGSISPRVIMGWYRQAPGKEREFVATIAQGATTYADSVKGRFTISRDNAKNTVYLQMNSLKPEDTAVYYCAVRYWETLGYHYWGQGTQVTVSS

SEQ ID NO: 37916 - protein, 122 aa, Artificial Sequence
  Chemically Synthesized
QVQLQESGGGLVQAGGSLRLSCAASGSISQFTSMGWYRQAPGKEREFVAGITSGGTTNYADSVKGRFTISRDNAKNTVYLQMNSLKPEDTAVYYCAVYADDSIAYVQQLDYWGQGTQVTVSS

SEQ ID NO: 37917 - protein, 118 aa, Artificial Sequence
  Chemically Synthesized
QVQLQESGGGLVQAGGSLRLSCAASGNIFSTYAMGWYRQAPGKEREFVASIANGTTTNYADSVKGRFTISRDNAKNTVYLQMNSLKPEDTAVYYCAAYYEYQSTHDYWGQGTQVTVSS

SEQ ID NO: 37918 - protein, 117 aa, Artificial Sequence
  Chemically Synthesized
QVQLQESGGGLVQAGGSLRLSCAASGNISDLTMGWYRQAPGKEREFVASIGYGANTNYADSVKGRFTISRDNAKNTVYLQMNSLKPEDTAVYYCAVGARTSPYLDYWGQGTQVTVSS

SEQ ID NO: 37919 - protein, 117 aa, Artificial Sequence
  Chemically Synthesized
QVQLQESGGGLVQAGGSLRLSCAASGSIFGDQYMGWYRQAPGKERELVAAIDAGGITNYADSVKGRFTISRDNAKNTVYLQMNSLKPEDTAVYYCAVNLSIVTRLYWGQGTQVTVSS

SEQ ID NO: 37920 - protein, 120 aa, Artificial Sequence
  Chemically Synthesized
QVQLQESGGGLVQAGGSLRLSCAASGTIFDRGYMGWYRQAPGKEREFVATIAGGTTNYADSVKGRFTISRDNAKNTVYLQMNSLKPEDTAVYYCAVNGGRGYVRSTLIYWGQGTQVTVSS

SEQ ID NO: 37921 - protein, 118 aa, Artificial Sequence
  Chemically Synthesized
QVQLQESGGGLVQAGGSLRLSCAASGYIFVNLVMGWYRQAPGKEREFVATITYGGTTYYADSVKGRFTISRDNAKNTVYLQMNSLKPEDTAVYYCAANDQDQEALDYWGQGTQVTVSS

SEQ ID NO: 37922 - protein, 122 aa, Artificial Sequence
  Chemically Synthesized
QVQLQESGGGLVQAGGSLRLSCAASGSIFTYLDMGWYRQAPGKERELVAGISYGSTTNYADSVKGRFTISRDNAKNTVYLQMNSLKPEDTAVYYCAVKDYSYLAFPQYLAYWGQGTQVTVSS

SEQ ID NO: 37923 - protein, 118 aa, Artificial Sequence
  Chemically Synthesized
QVQLQESGGGLVQAGGSLRLSCAASGNIFTYRDMGWYRQAPGKERELVATITTGASTYYADSVKGRFTISRDNAKNTVYLQMNSLKPEDTAVYYCAAIYLRDYNLYYWGQGTQVTVSS

SEQ ID NO: 37924 - protein, 122 aa, Artificial Sequence
  Chemically Synthesized
QVQLQESGGGLVQAGGSLRLSCAASGNIFWQYRMGWYRQAPGKERELVATIGYGATTYYADSVKGRFTISRDNAKNTVYLQMNSLKPEDTAVYYCAVVDWYTATAWYGLYYWGQGTQVTVSS

SEQ ID NO: 37925 - protein, 117 aa, Artificial Sequence
  Chemically Synthesized
QVQLQESGGGLVQAGGSLRLSCAASGNISRAYMGWYRQAPGKEREFVASIDYGGNTNYADSVKGRFTISRDNAKNTVYLQMNSLKPEDTAVYYCAVISYEYDGYRYWGQGTQVTVSS

SEQ ID NO: 37926 - protein, 122 aa, Artificial Sequence
  Chemically Synthesized
QVQLQESGGGLVQAGGSLRLSCAASGSIFSYLWMGWYRQAPGKEREFVAGISSGTTTYYADSVKGRFTISRDNAKNTVYLQMNSLKPEDTAVYYCAAANRTGNQYKQDLDYWGQGTQVTVSS

SEQ ID NO: 37927 - protein, 118 aa, Artificial Sequence
  Chemically Synthesized
QVQLQESGGGLVQAGGSLRLSCAASGNISYRYVMGWYRQAPGKEREFVAAIAYGGNTNYADSVKGRFTISRDNAKNTVYLQMNSLKPEDTAVYYCAVLYYSNFWHYYWGQGTQVTVSS

SEQ ID NO: 37928 - protein, 117 aa, Artificial Sequence
  Chemically Synthesized
QVQLQESGGGLVQAGGSLRLSCAASGTIFRDWSMGWYRQAPGKERELVAAIGDGAITYYADSVKGRFTISRDNAKNTVYLQMNSLKPEDTAVYYCAVGSRTLTVMYWGQGTQVTVSS

SEQ ID NO: 37929 - protein, 120 aa, Artificial Sequence
  Chemically Synthesized
QVQLQESGGGLVQAGGSLRLSCAASGTIFDSDDMGWYRQAPGKEREFVATIGDGGSYADSVKGRFTISRDNAKNTVYLQMNSLKPEDTAVYYCAVYSYVQYQYYDSHGYWGQGTQVTVSS

SEQ ID NO: 37930 - protein, 118 aa, Artificial Sequence
  Chemically Synthesized
QVQLQESGGGLVQAGGSLRLSCAASGSISVQYVMGWYRQAPGKEREFVAAIARGSTTNYADSVKGRFTISRDNAKNTVYLQMNSLKPEDTAVYYCAAVVYSGVYHWYWGQGTQVTVSS

SEQ ID NO: 37931 - protein, 120 aa, Artificial Sequence
  Chemically Synthesized
QVQLQESGGGLVQAGGSLRLSCAASGYISSKSYMGWYRQAPGKEREFVASINGGATNYADSVKGRFTISRDNAKNTVYLQMNSLKPEDTAVYYCAAKNAPDTLTLTNIYWGQGTQVTVSS

SEQ ID NO: 37932 - protein, 125 aa, Artificial Sequence
  Chemically Synthesized
QVQLQESGGGLVQAGGSLRLSCAASGSIFLQRNMGWYRQAPGKERELVASISTGSTTYYADSVKGRFTISRDNAKNTVYLQMNSLKPEDTAVYYCAVEEGPTAIYDYLDILSCYWGQGTQVTVSS

SEQ ID NO: 37933 - protein, 117 aa, Artificial Sequence
  Chemically Synthesized
QVQLQESGGGLVQAGGSLRLSCAASGYISASQDMGWYRQAPGKERELVAAITPGASTYYADSVKGRFTISRDNAKNTVYLQMNSLKPEDTAVYYCAVYAITTNCMYWGQGTQVTVSS

SEQ ID NO: 37934 - protein, 116 aa, Artificial Sequence
  Chemically Synthesized
QVQLQESGGGLVQAGGSLRLSCAASGSIFVAIGMGWYRQAPGKEREFVAAITDGSNTNYADSVKGRFTISRDNAKNTVYLQMNSLKPEDTAVYYCAAIARRYHYYWGQGTQVTVSS

SEQ ID NO: 37935 - protein, 118 aa, Artificial Sequence
  Chemically Synthesized
QVQLQESGGGLVQAGGSLRLSCAASGYIFYRHSMGWYRQAPGKEREFVAAIGRGTNTYYADSVKGRFTISRDNAKNTVYLQMNSLKPEDTAVYYCAANQYFYWSFAYWGQGTQVTVSS

SEQ ID NO: 37936 - protein, 117 aa, Artificial Sequence
  Chemically Synthesized
QVQLQESGGGLVQAGGSLRLSCAASGTIFYVSKMGWYRQAPGKEREFVPLLVTVLIPYADSVKGRFTISRDNAKNTVYLQMNSLKPEDTAVYYCAAYGSYFASLRYWGQGTQVTVSS

SEQ ID NO: 37937 - protein, 118 aa, Artificial Sequence
  Chemically Synthesized
QVQLQESGGGLVQAGGSLRLSCAASGTISNYASMGWYRQAPGKEREFVATISIGASTNYADSVKGRFTISRDNAKNTVYLQMNSLKPEDTAVYYCAVAYPAVWSAYYWGQGTQVTVSS

SEQ ID NO: 37938 - protein, 127 aa, Artificial Sequence
  Chemically Synthesized
QVQLQESGGGLVQAGGSLRLSCAASGSIFIDSYMGWYRQAPGKERELVASINGGGGITNYADSVKGRFTISRDNAKNTVYLQMNSLKPEDTAVYYCAAEVYPYQEAVYTLDDLHDYWGQGTQVTVSS

SEQ ID NO: 37939 - protein, 117 aa, Artificial Sequence
  Chemically Synthesized
QVQLQESGGGLVQAGGSLRLSCAASGNISDRYIMGWYRQAPGKERELVASISVGTNTYYADSVKGRFTISRDNAKNTVYLQMNSLKPEDTAVYYCAVFAPGNTLTYWGQGTQVTVSS

SEQ ID NO: 37940 - protein, 118 aa, Artificial Sequence
  Chemically Synthesized
QVQLQESGGGLVQAGGSLRLSCAASGTIFQPNGMGWYRQAPGKEREFVAGITPGASTNYADSVKGRFTISRDNAKNTVYLQMNSLKPEDTAVYYCAAVTYVRYYHYYWGQGTQVTVSS

SEQ ID NO: 37941 - protein, 119 aa, Artificial Sequence
  Chemically Synthesized
QVQLQESGGGLVQAGGSLRLSCAASGTISWHDSMGWYRQAPGKERELVATIGIGAITYYADSVKGRFTISRDNAKNTVYLQMNSLKPEDTAVYYCAAGVGGWAYLYDYWGQGTQVTVSS

SEQ ID NO: 37942 - protein, 118 aa, Artificial Sequence
  Chemically Synthesized
QVQLQESGGGLVQAGGSLRLSCAASGTIFDGYVMGWYRQAPGKEREFVATISNGGTTNYADSVKGRFTISRDNAKNTVYLQMNSLKPEDTAVYYCAAYYGRADAYYYWGQGTQVTVSS

SEQ ID NO: 37943 - protein, 118 aa, Artificial Sequence
  Chemically Synthesized
QVQLQESGGGLVQAGGSLRLSCAASGTIFGRYFMGWYRQAPGKEREFVAGIAWGGITYYADSVKGRFTISRDNAKNTVYLQMNSLKPEDTAVYYCAAYFRRVGLYHYWGQGTQVTVSS

SEQ ID NO: 37944 - protein, 119 aa, Artificial Sequence
  Chemically Synthesized
QVQLQESGGGLVQAGGSLRLSCAASGTISYYRGMGWYRQAPGKEREFVAAITDGSTTNYADSVKGRFTISRDNAKNTVYLQMNSLKPEDTAVYYCAVVIYIQGHYHDYWGQGTQVTVSS

SEQ ID NO: 37945 - protein, 118 aa, Artificial Sequence
  Chemically Synthesized
QVQLQESGGGLVQAGGSLRLSCAASGSISYPLTMGWYRQAPGKERELVASIGGGGSTYYADSVKGRFTISRDNAKNTVYLQMNSLKPEDTAVYYCAAIAPYDWRLYYWGQGTQVTVSS

SEQ ID NO: 37946 - protein, 118 aa, Artificial Sequence
  Chemically Synthesized
QVQLQESGGGLVQAGGSLRLSCAASGTISFDLIMGWYRQAPGKEREFVAGITVGGTTNYADSVKGRFTISRDNAKNTVYLQMNSLKPEDTAVYYCAAVYQRRNQLYYWGQGTQVTVSS

SEQ ID NO: 37947 - protein, 118 aa, Artificial Sequence
  Chemically Synthesized
QVQLQESGGGLVQAGGSLRLSCAASGYISALYYMGWYRQAPGKERELVAGIALGSNTYYADSVKGRFTISRDNAKNTVYLQMNSLKPEDTAVYYCAAWGYFSLWFIYWGQGTQVTVSS

SEQ ID NO: 37948 - protein, 118 aa, Artificial Sequence
  Chemically Synthesized
QVQLQESGGGLVQAGGSLRLSCAASGNISQPYAMGWYRQAPGKEREFVAGISAGTNTNYADSVKGRFTISRDNAKNTVYLQMNSLKPEDTAVYYCAALTLGSNGLYYWGQGTQVTVSS

SEQ ID NO: 37949 - protein, 116 aa, Artificial Sequence
  Chemically Synthesized
QVQLQESGGGLVQAGGSLRLSCAASGSISDSLTMGWYRQAPGKEREFVAAINRGANTYYADSVKGRFTISRDNAKNTVYLQMNSLKPEDTAVYYCAVLDYDKRYYWGQGTQVTVSS

SEQ ID NO: 37950 - protein, 117 aa, Artificial Sequence
  Chemically Synthesized
QVQLQESGGGLVQAGGSLRLSCAASGYISYSLMGWYRQAPGKEREFVAGISYGSSTNYADSVKGRFTISRDNAKNTVYLQMNSLKPEDTAVYYCAASYVDQRLFYYWGQGTQVTVSS

SEQ ID NO: 37951 - protein, 118 aa, Artificial Sequence
  Chemically Synthesized
QVQLQESGGGLVQAGGSLRLSCAASGTISGRIIMGWYRQAPGKEREFVAGIGVGGNTNYADSVKGRFTISRDNAKNTVYLQMNSLKPEDTAVYYCAAYLQDYRGLYYWGQGTQVTVSS

SEQ ID NO: 37952 - protein, 117 aa, Artificial Sequence
  Chemically Synthesized
QVQLQESGGGLVQAGGSLRLSCAASGTIFVTTMGWYRQAPGKERELVAAIGNGTNTNYADSVKGRFTISRDNAKNTVYLQMNSLKPEDTAVYYCAAGLYTSLYFPYWGQGTQVTVSS

SEQ ID NO: 37953 - protein, 117 aa, Artificial Sequence
  Chemically Synthesized
QVQLQESGGGLVQAGGSLRLSCAASGSIFGRYDMGWYRQAPGKERELVATINGGSTTYYADSVKGRFTISRDNAKNTVYLQMNSLKPEDTAVYYCALLTLCLLVMYWGQGTQVTVSS

SEQ ID NO: 37954 - protein, 117 aa, Artificial Sequence
  Chemically Synthesized
QVQLQESGGGLVQAGGSLRLSCAASGYISRYGPMGWYRQAPGKEREFVASIDTGSSTYYADSVKGRFTISRDNAKNTVYLQMNSLKPEDTAVYYCAVRGQGSCVMYWGQGTQVTVSS

SEQ ID NO: 37955 - protein, 122 aa, Artificial Sequence
  Chemically Synthesized
QVQLQESGGGLVQAGGSLRLSCAASGSISYRVHMGWYRQAPGKERELVASITRGGNTNYADSVKGRFTISRDNAKNTVYLQMNSLKPEDTAVYYCAVYEYQYQSYDKPFYYWGQGTQVTVSS

SEQ ID NO: 37956 - protein, 118 aa, Artificial Sequence
  Chemically Synthesized
QVQLQESGGGLVQAGGSLRLSCAASGNISAGSGMGWYRQAPGKERELVASIAVGASTYYADSVKGRFTISRDNAKNTVYLQMNSLKPEDTAVYYCAVPAYYRYSFGYWGQGTQVTVSS

SEQ ID NO: 37957 - protein, 121 aa, Artificial Sequence
  Chemically Synthesized
QVQLQESGGGLVQAGGSLRLSCAASGSIFGPYYMGWYRQAPGKERELVASITSGTSTNYADSVKGRFTISRDNAKNTVYLQMNSLKPEDTAVYYCAVEGVDDFDDYYFGYWGQGTQVTVSS

SEQ ID NO: 37958 - protein, 117 aa, Artificial Sequence
  Chemically Synthesized
QVQLQESGGGLVQAGGSLRLSCAASGNIFLYYYMGWYRQAPGKERELVATIGYGSSTNYADSVKGRFTISRDNAKNTVYLQMNSLKPEDTAVYYCAATQAPWSYHYWGQGTQVTVSS

SEQ ID NO: 37959 - protein, 120 aa, Artificial Sequence
  Chemically Synthesized
QVQLQESGGGLVQAGGSLRLSCAASGSISVLPYMGWYRQAPGKEREFVASISYGASTNYADSVKGRFTISRDNAKNTVYLQMNSLKPEDTAVYYCAALTKRKRDGYHDYWGQGTQVTVSS

SEQ ID NO: 37960 - protein, 122 aa, Artificial Sequence
  Chemically Synthesized
QVQLQESGGGLVQAGGSLRLSCAASGNIFGRGVMGWYRQAPGKERELVAGIGYGATTNYADSVKGRFTISRDNAKNTVYLQMNSLKPEDTAVYYCAATGADTYYSNGTHSYWGQGTQVTVSS

SEQ ID NO: 37961 - protein, 118 aa, Artificial Sequence
  Chemically Synthesized
QVQLQESGGGLVQAGGSLRLSCAASGYISGIRSMGWYRQAPGKEREFVAGIGGGGITNYADSVKGRFTISRDNAKNTVYLQMNSLKPEDTAVYYCAVVSYSRGHHAYWGQGTQVTVSS

SEQ ID NO: 37962 - protein, 118 aa, Artificial Sequence
  Chemically Synthesized
QVQLQESGGGLVQAGGSLRLSCAASGYISRFYDMGWYRQAPGKERELVAAIGYGASTYYADSVKGRFTISRDNAKNTVYLQMNSLKPEDTAVYYCAVGNVYREQHAYWGQGTQVTVSS

SEQ ID NO: 37963 - protein, 118 aa, Artificial Sequence
  Chemically Synthesized
QVQLQESGGGLVQAGGSLRLSCAASGNIFPVNYMGWYRQAPGKERELVAAINVGGNTNYADSVKGRFTISRDNAKNTVYLQMNSLKPEDTAVYYCAAGAAATYNLPYWGQGTQVTVSS

SEQ ID NO: 37964 - protein, 124 aa, Artificial Sequence
  Chemically Synthesized
QVQLQESGGGLVQAGGSLRLSCAASGNIFGSADMGWYRQAPGKEREFVAAITVGGTTNYADSVKGRFTISRDNAKNTVYLQMNSLKPEDTAVYYCAVRYTDAVYVYYIGTHNYWGQGTQVTVSS

SEQ ID NO: 37965 - protein, 122 aa, Artificial Sequence
  Chemically Synthesized
QVQLQESGGGLVQAGGSLRLSCAASGYISLAYIMGWYRQAPGKEREFVATIGVGGSTYYADSVKGRFTISRDNAKNTVYLQMNSLKPEDTAVYYCAVALGYFTYVSDYHSYWGQGTQVTVSS

SEQ ID NO: 37966 - protein, 122 aa, Artificial Sequence
  Chemically Synthesized
QVQLQESGGGLVQAGGSLRLSCAASGYIFRPYPMGWYRQAPGKERELVATIDHGANTNYADSVKGRFTISRDNAKNTVYLQMNSLKPEDTAVYYCAARVQGDYDHSALLPYWGQGTQVTVSS

SEQ ID NO: 37967 - protein, 116 aa, Artificial Sequence
  Chemically Synthesized
QVQLQESGGGLVQAGGSLRLSCAASGYISYSRMGWYRQAPGKERELVAAIADGTITNYADSVKGRFTISRDNAKNTVYLQMNSLKPEDTAVYYCAVDRYSPEFGYWGQGTQVTVSS

SEQ ID NO: 37968 - protein, 118 aa, Artificial Sequence
  Chemically Synthesized
QVQLQESGGGLVQAGGSLRLSCAASGNISQRGYMGWYRQAPGKEREFVASIDYGGNTNYADSVKGRFTISRDNAKNTVYLQMNSLKPEDTAVYYCAALGRSDSWLAYWGQGTQVTVSS

SEQ ID NO: 37969 - protein, 125 aa, Artificial Sequence
  Chemically Synthesized
QVQLQESGGGLVQAGGSLRLSCAASGSISDSRMGWYRQAPGKERELVAAISAGGSTNYADSVKGRFTISRDNAKNTVYLQMNSLKPEDTAVYYCAVGTFERVDYYRDSNGDHAYWGQGTQVTVSS

SEQ ID NO: 37970 - protein, 118 aa, Artificial Sequence
  Chemically Synthesized
QVQLQESGGGLVQAGGSLRLSCAASGSISPPDIMGWYRQAPGKEREFVAGIATGSTTNYADSVKGRFTISRDNAKNTVYLQMNSLKPEDTAVYYCAAIDYVSHYHYYWGQGTQVTVSS

SEQ ID NO: 37971 - protein, 118 aa, Artificial Sequence
  Chemically Synthesized
QVQLQESGGGLVQAGGSLRLSCAASGNISRDYSMGWYRQAPGKEREFVASIARGGSTNYADSVKGRFTISRDNAKNTVYLQMNSLKPEDTAVYYCAAVQFIRYWHQYWGQGTQVTVSS

SEQ ID NO: 37972 - protein, 115 aa, Artificial Sequence
  Chemically Synthesized
QVQLQESGGGLVQAGGSLRLSCAASGYISANTRMGWYRQAPGKEREFVAGIAIGTITNYADSVKGRFTISRDNAKNTVYLQMNSLKPEDTAVYYCAVVNRCTLYWGQGTQVTVSS

SEQ ID NO: 37973 - protein, 118 aa, Artificial Sequence
  Chemically Synthesized
QVQLQESGGGLVQAGGSLRLSCAASGYIFVTHGMGWYRQAPGKEREFVATISFGSTTNYADSVKGRFTISRDNAKNTVYLQMNSLKPEDTAVYYCAVYIYYYHYYQYWGQGTQVTVSS

SEQ ID NO: 37974 - protein, 122 aa, Artificial Sequence
  Chemically Synthesized
QVQLQESGGGLVQAGGSLRLSCAASGYISDGADMGWYRQAPGKERELVAAINFRCYYQYADSVKGRFTISRDNAKNTVYLQMNSLKPEDTAVYYCAANGYLPGVVDDTLAYWGQGTQVTVSS

SEQ ID NO: 37975 - protein, 122 aa, Artificial Sequence
  Chemically Synthesized
QVQLQESGGGLVQAGGSLRLSCAASGSISYGAVMGWYRQAPGKEREFVAAINAWWYYLYADSVKGRFTISRDNAKNTVYLQMNSLKPEDTAVYYCAVNDESYYDYRRDHYYWGQGTQVTVSS

SEQ ID NO: 37976 - protein, 120 aa, Artificial Sequence
  Chemically Synthesized
QVQLQESGGGLVQAGGSLRLSCAASGNISDFTMGWYRQAPGKEREFVAAIAEGGITYYADSVKGRFTISRDNAKNTVYLQMNSLKPEDTAVYYCAAYVDHSHNHEGYFYWGQGTQVTVSS

SEQ ID NO: 37977 - protein, 126 aa, Artificial Sequence
  Chemically Synthesized
QVQLQESGGGLVQAGGSLRLSCAASGYISTYTSMGWYRQAPGKEREFVASISYGSSTNYADSVKGRFTISRDNAKNTVYLQMNSLKPEDTAVYYCAVYVAQEPSDYATYSRIHAYWGQGTQVTVSS

SEQ ID NO: 37978 - protein, 126 aa, Artificial Sequence
  Chemically Synthesized
QVQLQESGGGLVQAGGSLRLSCAASGTIFTWDRMGWYRQAPGKEREFVATIDIGGSTNYADSVKGRFTISRDNAKNTVYLQMNSLKPEDTAVYYCAVHIVTPYVNIVYYDILYSYWGQGTQVTVSS

SEQ ID NO: 37979 - protein, 118 aa, Artificial Sequence
  Chemically Synthesized
QVQLQESGGGLVQAGGSLRLSCAASGNIFRYATMGWYRQAPGKEREFVAGISDGANTYYADSVKGRFTISRDNAKNTVYLQMNSLKPEDTAVYYCAVRYYNGLHHYYWGQGTQVTVSS

SEQ ID NO: 37980 - protein, 118 aa, Artificial Sequence
  Chemically Synthesized
QVQLQESGGGLVQAGGSLRLSCAASGYIFRYAYMGWYRQAPGKERELVAAINNGATTNYADSVKGRFTISRDNAKNTVYLQMNSLKPEDTAVYYCAVDDSTGFRLRYWGQGTQVTVSS

SEQ ID NO: 37981 - protein, 118 aa, Artificial Sequence
  Chemically Synthesized
QVQLQESGGGLVQAGGSLRLSCAASGSIFSRGSMGWYRQAPGKEREFVAAIGDGTSTNYADSVKGRFTISRDNAKNTVYLQMNSLKPEDTAVYYCAVLYVDRTVYYYWGQGTQVTVSS

SEQ ID NO: 37982 - protein, 125 aa, Artificial Sequence
  Chemically Synthesized
QVQLQESGGGLVQAGGSLRLSCAASGFSLFYGMGWYRQAPGKERELVAAINFGGSTNYADSVKGRFTISRDNAKNTVYLQMNSLKPEDTAVYYCAVLRRFYWQNSRGEADWHWYWGQGTQVTVSS

SEQ ID NO: 37983 - protein, 117 aa, Artificial Sequence
  Chemically Synthesized
QVQLQESGGGLVQAGGSLRLSCAASGNIFDYDDMGWYRQAPGKEREFVAGISYGGITYYADSVKGRFTISRDNAKNTVYLQMNSLKPEDTAVYYCAAGVPSGSVIYWGQGTQVTVSS

SEQ ID NO: 37984 - protein, 122 aa, Artificial Sequence
  Chemically Synthesized
QVQLQESGGGLVQAGGSLRLSCAASGNIFRSNYMGWYRQAPGKERELVAGIAYGGSTYYADSVKGRFTISRDNAKNTVYLQMNSLKPEDTAVYYCAAGEYQYTAGPRTHDYWGQGTQVTVSS

SEQ ID NO: 37985 - protein, 118 aa, Artificial Sequence
  Chemically Synthesized
QVQLQESGGGLVQAGGSLRLSCAASGNISDVGSMGWYRQAPGKEREFVAAISDGGNTYYADSVKGRFTISRDNAKNTVYLQMNSLKPEDTAVYYCAVYYWHDGHHYYWGQGTQVTVSS

SEQ ID NO: 37986 - protein, 119 aa, Artificial Sequence
  Chemically Synthesized
QVQLQESGGGLVQAGGSLRLSCAASGSISGTSSMGWYRQAPGKEREFVAGIAGGATTNYADSVKGRFTISRDNAKNTVYLQMNSLKPEDTAVYYCAAVTYDGRYYHYYWGQGTQVTVSS

SEQ ID NO: 37987 - protein, 118 aa, Artificial Sequence
  Chemically Synthesized
QVQLQESGGGLVQAGGSLRLSCAASGYISYYSIMGWYRQAPGKERELVATINYGSNTNYADSVKGRFTISRDNAKNTVYLQMNSLKPEDTAVYYCAVRRVNRLAYPYWGQGTQVTVSS

SEQ ID NO: 37988 - protein, 122 aa, Artificial Sequence
  Chemically Synthesized
QVQLQESGGGLVQAGGSLRLSCAASGYISYWPTMGWYRQAPGKEREFVAAIGYGSTTNYADSVKGRFTISRDNAKNTVYLQMNSLKPEDTAVYYCAVTRYLPGTTIAYHFYWGQGTQVTVSS

SEQ ID NO: 37989 - protein, 118 aa, Artificial Sequence
  Chemically Synthesized
QVQLQESGGGLVQAGGSLRLSCAASGTISAYYKMGWYRQAPGKERELVATIAYGGSTNYADSVKGRFTISRDNAKNTVYLQMNSLKPEDTAVYYCAVIVGRYDPLIYWGQGTQVTVSS

SEQ ID NO: 37990 - protein, 118 aa, Artificial Sequence
  Chemically Synthesized
QVQLQESGGGLVQAGGSLRLSCAASGSIFGWFYMGWYRQAPGKERELVASITRGSSTNYADSVKGRFTISRDNAKNTVYLQMNSLKPEDTAVYYCAVTYATPGDFTYWGQGTQVTVSS

SEQ ID NO: 37991 - protein, 114 aa, Artificial Sequence
  Chemically Synthesized
QVQLQESGGGLVQAGGSLRLSCAASGSISDFGGMGWYRQAPGKEREFVDQYADSVKGRFTISRDNAKNTVYLQMNSLKPEDTAVYYCAVDRDRRYYTIPDYWYWGQGTQVTVSS

SEQ ID NO: 37992 - protein, 115 aa, Artificial Sequence
  Chemically Synthesized
QVQLQESGGGLVQAGGSLRLSCAASGNISIYNTMGWYRQAPGKEREFVVLLVLHLYADSVKGRFTISRDNAKNTVYLQMNSLKPEDTAVYYCAADGVKRGQLDYWGQGTQVTVSS

SEQ ID NO: 37993 - protein, 117 aa, Artificial Sequence
  Chemically Synthesized
QVQLQESGGGLVQAGGSLRLSCAASGYIFTSELMGWYRQAPGKEREFVAAISSGANTNYADSVKGRFTISRDNAKNTVYLQMNSLKPEDTAVYYCAVYVVGRETLYWGQGTQVTVSS

SEQ ID NO: 37994 - protein, 118 aa, Artificial Sequence
  Chemically Synthesized
QVQLQESGGGLVQAGGSLRLSCAASGNIFQEPTMGWYRQAPGKEREFVAAISDGATTNYADSVKGRFTISRDNAKNTVYLQMNSLKPEDTAVYYCAADIVSGYQLGYWGQGTQVTVSS

SEQ ID NO: 37995 - protein, 118 aa, Artificial Sequence
  Chemically Synthesized
QVQLQESGGGLVQAGGSLRLSCAASGSISRANPMGWYRQAPGKERELVAGIGYGGITNYADSVKGRFTISRDNAKNTVYLQMNSLKPEDTAVYYCAAYKRGPYDLAYWGQGTQVTVSS

SEQ ID NO: 37996 - protein, 118 aa, Artificial Sequence
  Chemically Synthesized
QVQLQESGGGLVQAGGSLRLSCAASGTIFYSRYMGWYRQAPGKERELVAAIDYGTTTYYADSVKGRFTISRDNAKNTVYLQMNSLKPEDTAVYYCAVIYARYTKHIYWGQGTQVTVSS

SEQ ID NO: 37997 - protein, 113 aa, Artificial Sequence
  Chemically Synthesized
QVQLQESGGGLVQAGGSLRLSCAASGTISLAQVMGWYRQAPGKERELVAAITWGGSTNYADSVKGRFTISRDNAKNTVYLQMNSLKPEDTAVYYCAAKTLLYWGQGTQVTVSS

SEQ ID NO: 37998 - protein, 117 aa, Artificial Sequence
  Chemically Synthesized
QVQLQESGGGLVQAGGSLRLSCAASGYISYFYAMGWYRQAPGKERELVASISDGANTYYADSVKGRFTISRDNAKNTVYLQMNSLKPEDTAVYYCAADNYSTTTIYWGQGTQVTVSS

SEQ ID NO: 37999 - protein, 121 aa, Artificial Sequence
  Chemically Synthesized
QVQLQESGGGLVQAGGSLRLSCAASGSISQNVPMGWYRQAPGKERELVATINDGAITNYADSVKGRFTISRDNAKNTVYLQMNSLKPEDTAVYYCAAWYYGARGYRPHGYWGQGTQVTVSS

SEQ ID NO: 38000 - protein, 118 aa, Artificial Sequence
  Chemically Synthesized
QVQLQESGGGLVQAGGSLRLSCAASGYISLRVHMGWYRQAPGKEREFVAAIAYGGNTNYADSVKGRFTISRDNAKNTVYLQMNSLKPEDTAVYYCAASHRQADDHYYWGQGTQVTVSS

SEQ ID NO: 38001 - protein, 122 aa, Artificial Sequence
  Chemically Synthesized
QVQLQESGGGLVQAGGSLRLSCAASGNIFSASYMGWYRQAPGKEREFVAAIARGGITYYADSVKGRFTISRDNAKNTVYLQMNSLKPEDTAVYYCAATYTDYLDADTDYQYWGQGTQVTVSS

SEQ ID NO: 38002 - protein, 122 aa, Artificial Sequence
  Chemically Synthesized
QVQLQESGGGLVQAGGSLRLSCAASGTIFSNALMGWYRQAPGKERELVAAITGGAITNYADSVKGRFTISRDNAKNTVYLQMNSLKPEDTAVYYCAATSVVLTSTTLNCMYWGQGTQVTVSS

SEQ ID NO: 38003 - protein, 117 aa, Artificial Sequence
  Chemically Synthesized
QVQLQESGGGLVQAGGSLRLSCAASGSISFTYMGWYRQAPGKERELVASIGQGGNTNYADSVKGRFTISRDNAKNTVYLQMNSLKPEDTAVYYCAVVVGGRAALHYWGQGTQVTVSS

SEQ ID NO: 38004 - protein, 126 aa, Artificial Sequence
  Chemically Synthesized
QVQLQESGGGLVQAGGSLRLSCAASGNIFFGPLMGWYRQAPGKEREFVATISIGGITYYADSVKGRFTISRDNAKNTVYLQMNSLKPEDTAVYYCAVYYRWGEDRDPDTTLLHDYWGQGTQVTVSS

SEQ ID NO: 38005 - protein, 122 aa, Artificial Sequence
  Chemically Synthesized
QVQLQESGGGLVQAGGSLRLSCAASGSIFDAPFMGWYRQAPGKEREFVATIGPGGTTNYADSVKGRFTISRDNAKNTVYLQMNSLKPEDTAVYYCAVTYQIYVTLQSGLPYWGQGTQVTVSS

SEQ ID NO: 38006 - protein, 122 aa, Artificial Sequence
  Chemically Synthesized
QVQLQESGGGLVQAGGSLRLSCAASGSIFLLDRMGWYRQAPGKEREFVAGIGYGGSTYYADSVKGRFTISRDNAKNTVYLQMNSLKPEDTAVYYCAAQTWDEDGYWSDYDYWGQGTQVTVSS

SEQ ID NO: 38007 - protein, 122 aa, Artificial Sequence
  Chemically Synthesized
QVQLQESGGGLVQAGGSLRLSCAASGNISYPRRMGWYRQAPGKEREFVASIGYGSNTYYADSVKGRFTISRDNAKNTVYLQMNSLKPEDTAVYYCAAQRSDDAPTYRYHFYWGQGTQVTVSS

SEQ ID NO: 38008 - protein, 120 aa, Artificial Sequence
  Chemically Synthesized
QVQLQESGGGLVQAGGSLRLSCAASGSISDTTGMGWYRQAPGKEREFVAAINSGGSTYYADSVKGRFTISRDNAKNTVYLQMNSLKPEDTAVYYCAAPYNASYARYLYYWGQGTQVTVSS

SEQ ID NO: 38009 - protein, 118 aa, Artificial Sequence
  Chemically Synthesized
QVQLQESGGGLVQAGGSLRLSCAASGSIGMGWYRQAPGKERELVAGISSGGTTNYADSVKGRFTISRDNAKNTVYLQMNSLKPEDTAVYYCAANAPYEWYDWYAYAYWGQGTQVTVSS

SEQ ID NO: 38010 - protein, 118 aa, Artificial Sequence
  Chemically Synthesized
QVQLQESGGGLVQAGGSLRLSCAASGTISAIDAMGWYRQAPGKEREFVAGIGNGAITYYADSVKGRFTISRDNAKNTVYLQMNSLKPEDTAVYYCAAVQGEYDYLWYWGQGTQVTVSS

SEQ ID NO: 38011 - protein, 122 aa, Artificial Sequence
  Chemically Synthesized
QVQLQESGGGLVQAGGSLRLSCAASGYISRIDRMGWYRQAPGKEREFVAGITYGTITNYADSVKGRFTISRDNAKNTVYLQMNSLKPEDTAVYYCAVGYYSSKLNEWSYFYWGQGTQVTVSS

SEQ ID NO: 38012 - protein, 118 aa, Artificial Sequence
  Chemically Synthesized
QVQLQESGGGLVQAGGSLRLSCAASGNISDPPDMGWYRQAPGKEREFVAAISIGATTYYADSVKGRFTISRDNAKNTVYLQMNSLKPEDTAVYYCAVYVDWSDVFFYWGQGTQVTVSS

SEQ ID NO: 38013 - protein, 118 aa, Artificial Sequence
  Chemically Synthesized
QVQLQESGGGLVQAGGSLRLSCAASGNISYYAEMGWYRQAPGKEREFVAAIAWGANTYYADSVKGRFTISRDNAKNTVYLQMNSLKPEDTAVYYCAVYYDIPRNHFYWGQGTQVTVSS

SEQ ID NO: 38014 - protein, 117 aa, Artificial Sequence
  Chemically Synthesized
QVQLQESGGGLVQAGGSLRLSCAASGNIFYYIYMGWYRQAPGKEREFVAGITNGAITYYADSVKGRFTISRDNAKNTVYLQMNSLKPEDTAVYYCAAWDDVDAYPYWGQGTQVTVSS

SEQ ID NO: 38015 - protein, 118 aa, Artificial Sequence
  Chemically Synthesized
QVQLQESGGGLVQAGGSLRLSCAASGNISYPTDMGWYRQAPGKERELVAGIAGGSITYYADSVKGRFTISRDNAKNTVYLQMNSLKPEDTAVYYCAVDQYDQGDLDYWGQGTQVTVSS

SEQ ID NO: 38016 - protein, 118 aa, Artificial Sequence
  Chemically Synthesized
QVQLQESGGGLVQAGGSLRLSCAASGSISRSRPMGWYRQAPGKERELVAAIGNGTTTNYADSVKGRFTISRDNAKNTVYLQMNSLKPEDTAVYYCAVRSYYWWRHQYWGQGTQVTVSS

SEQ ID NO: 38017 - protein, 118 aa, Artificial Sequence
  Chemically Synthesized
QVQLQESGGGLVQAGGSLRLSCAASGSIFYYYYMGWYRQAPGKERELVAAISSGTSTYYADSVKGRFTISRDNAKNTVYLQMNSLKPEDTAVYYCAAASQYDYDYSYWGQGTQVTVSS

SEQ ID NO: 38018 - protein, 126 aa, Artificial Sequence
  Chemically Synthesized
QVQLQESGGGLVQAGGSLRLSCAASGSIFGTSSMGWYRQAPGKEREFVAGIDVGGTTYYADSVKGRFTISRDNAKNTVYLQMNSLKPEDTAVYYCAATRPYYLDRSQSDVAFHWYWGQGTQVTVSS

SEQ ID NO: 38019 - protein, 122 aa, Artificial Sequence
  Chemically Synthesized
QVQLQESGGGLVQAGGSLRLSCAASGTISFHPDMGWYRQAPGKERELVATIALGGSTYYADSVKGRFTISRDNAKNTVYLQMNSLKPEDTAVYYCAVYESPDTYYIDDLVYWGQGTQVTVSS

SEQ ID NO: 38020 - protein, 122 aa, Artificial Sequence
  Chemically Synthesized
QVQLQESGGGLVQAGGSLRLSCAASGYIFAYGDMGWYRQAPGKERELVAGIAGGSITYYADSVKGRFTISRDNAKNTVYLQMNSLKPEDTAVYYCAVDWTDINYYGGYFYYWGQGTQVTVSS

SEQ ID NO: 38021 - protein, 118 aa, Artificial Sequence
  Chemically Synthesized
QVQLQESGGGLVQAGGSLRLSCAASGTISYADDMGWYRQAPGKERELVATITTGATTYYADSVKGRFTISRDNAKNTVYLQMNSLKPEDTAVYYCAATYGGYKYLSYWGQGTQVTVSS

SEQ ID NO: 38022 - protein, 122 aa, Artificial Sequence
  Chemically Synthesized
QVQLQESGGGLVQAGGSLRLSCAASGTIFYLYAMGWYRQAPGKERELVAGIGYGGSTNYADSVKGRFTISRDNAKNTVYLQMNSLKPEDTAVYYCAVFQYYYADYSGTHDYWGQGTQVTVSS

SEQ ID NO: 38023 - protein, 114 aa, Artificial Sequence
  Chemically Synthesized
QVQLQESGGGLVQAGGSLRLSCAASGYIFTQWIMGWYRQAPGKERELVATINVGTNTYYADSVKGRFTISRDNAKNTVYLQMNSLKPEDTAVYYCAARDLYSYWGQGTQVTVSS

SEQ ID NO: 38024 - protein, 118 aa, Artificial Sequence
  Chemically Synthesized
QVQLQESGGGLVQAGGSLRLSCAASGSISVFYYMGWYRQAPGKERELVAAIAGGASTYYADSVKGRFTISRDNAKNTVYLQMNSLKPEDTAVYYCAADQVYVGPYQYWGQGTQVTVSS

SEQ ID NO: 38025 - protein, 121 aa, Artificial Sequence
  Chemically Synthesized
QVQLQESGGGLVQAGGSLRLSCAASGNIFPSWEMGWYRQAPGKEREFVASIDRGGTTYYADSVKGRFTISRDNAKNTVYLQMNSLKPEDTAVYYCAVTLLSRTTTVTTMYWGQGTQVTVSS

SEQ ID NO: 38026 - protein, 121 aa, Artificial Sequence
  Chemically Synthesized
QVQLQESGGGLVQAGGSLRLSCAASGNISAYVSMGWYRQAPGKERELVAAIYQYADSVKGRFTISRDNAKNTVYLQMNSLKPEDTAVYYCAVDYGGPFYVAYTYLYVHGYWGQGTQVTVSS

SEQ ID NO: 38027 - protein, 124 aa, Artificial Sequence
  Chemically Synthesized
QVQLQESGGGLVQAGGSLRLSCAASGTISYYYMGWYRQAPGKEREFVAGISGGTTNYADSVKGRFTISRDNAKNTVYLQMNSLKPEDTAVYYCAAYWDDTYVYDRPYWLWLYYWGQGTQVTVSS

SEQ ID NO: 38028 - protein, 119 aa, Artificial Sequence
  Chemically Synthesized
QVQLQESGGGLVQAGGSLRLSCAASGTISYSLQMGWYRQAPGKERELVAAIDDGGITYYADSVKGRFTISRDNAKNTVYLQMNSLKPEDTAVYYCAAVDTSTDYFHWYWGQGTQVTVSS

SEQ ID NO: 38029 - protein, 122 aa, Artificial Sequence
  Chemically Synthesized
QVQLQESGGGLVQAGGSLRLSCAASGNISVIVPMGWYRQAPGKEREFVAGIGAGGSTYYADSVKGRFTISRDNAKNTVYLQMNSLKPEDTAVYYCAAFQPYEYDRQSYHDYWGQGTQVTVSS

SEQ ID NO: 38030 - protein, 118 aa, Artificial Sequence
  Chemically Synthesized
QVQLQESGGGLVQAGGSLRLSCAASGTISRWQRMGWYRQAPGKERELVASISFGASTYYADSVKGRFTISRDNAKNTVYLQMNSLKPEDTAVYYCAAPSRSQWGHHYWGQGTQVTVSS

SEQ ID NO: 38031 - protein, 118 aa, Artificial Sequence
  Chemically Synthesized
QVQLQESGGGLVQAGGSLRLSCAASGNIFRAAYMGWYRQAPGKEREFVAAIAYGATTNYADSVKGRFTISRDNAKNTVYLQMNSLKPEDTAVYYCAARDNLRDGYRYWGQGTQVTVSS

SEQ ID NO: 38032 - protein, 118 aa, Artificial Sequence
  Chemically Synthesized
QVQLQESGGGLVQAGGSLRLSCAASGSISSGRYMGWYRQAPGKERELVAGIGSGSITYYADSVKGRFTISRDNAKNTVYLQMNSLKPEDTAVYYCAAYASIDGRYRYWGQGTQVTVSS

SEQ ID NO: 38033 - protein, 118 aa, Artificial Sequence
  Chemically Synthesized
QVQLQESGGGLVQAGGSLRLSCAASGSISYDVGMGWYRQAPGKEREFVAAISYGTTTYYADSVKGRFTISRDNAKNTVYLQMNSLKPEDTAVYYCAAYIYDGSSLRYWGQGTQVTVSS

SEQ ID NO: 38034 - protein, 118 aa, Artificial Sequence
  Chemically Synthesized
QVQLQESGGGLVQAGGSLRLSCAASGTISYSSDMGWYRQAPGKEREFVASIDFGSTTYYADSVKGRFTISRDNAKNTVYLQMNSLKPEDTAVYYCAADVVVDDDYAYWGQGTQVTVSS

SEQ ID NO: 38035 - protein, 122 aa, Artificial Sequence
  Chemically Synthesized
QVQLQESGGGLVQAGGSLRLSCAASGTISSKLRMGWYRQAPGKERELVATIAGGTNTNYADSVKGRFTISRDNAKNTVYLQMNSLKPEDTAVYYCAAYRTRTRYYHYWYRYWGQGTQVTVSS

SEQ ID NO: 38036 - protein, 119 aa, Artificial Sequence
  Chemically Synthesized
QVQLQESGGGLVQAGGSLRLSCAASGNISQPTNMGWYRQAPGKEREFVATISQGSITYYADSVKGRFTISRDNAKNTVYLQMNSLKPEDTAVYYCAVIQDINAQHFIYWGQGTQVTVSS

SEQ ID NO: 38037 - protein, 117 aa, Artificial Sequence
  Chemically Synthesized
QVQLQESGGGLVQAGGSLRLSCAASGSIFGAYDMGWYRQAPGKEREFVGIAYGASTYYADSVKGRFTISRDNAKNTVYLQMNSLKPEDTAVYYCAAHSYDSDDHRYWGQGTQVTVSS

SEQ ID NO: 38038 - protein, 117 aa, Artificial Sequence
  Chemically Synthesized
QVQLQESGGGLVQAGGSLRLSCAASGTTMGWYRQAPGKEREFVASIGVGTTTNYADSVKGRFTISRDNAKNTVYLQMNSLKPEDTAVYYCAVTERLFARLEFVLVYWGQGTQVTVSS

SEQ ID NO: 38039 - protein, 122 aa, Artificial Sequence
  Chemically Synthesized
QVQLQESGGGLVQAGGSLRLSCAASGTISTQPRMGWYRQAPGKEREFVASIGYGTSTNYADSVKGRFTISRDNAKNTVYLQMNSLKPEDTAVYYCAVGAWGDGYNPSGYYYWGQGTQVTVSS

SEQ ID NO: 38040 - protein, 118 aa, Artificial Sequence
  Chemically Synthesized
QVQLQESGGGLVQAGGSLRLSCAASGNISIGSTMGWYRQAPGKERELVASITSGASTYYADSVKGRFTISRDNAKNTVYLQMNSLKPEDTAVYYCAVKSAGDTYLDYWGQGTQVTVSS

SEQ ID NO: 38041 - protein, 118 aa, Artificial Sequence
  Chemically Synthesized
QVQLQESGGGLVQAGGSLRLSCAASGYISYPSYMGWYRQAPGKEREFVAAIGRGTNTYYADSVKGRFTISRDNAKNTVYLQMNSLKPEDTAVYYCAAGTRTRAWYRYWGQGTQVTVSS

SEQ ID NO: 38042 - protein, 117 aa, Artificial Sequence
  Chemically Synthesized
QVQLQESGGGLVQAGGSLRLSCAASGYIFSISPMGWYRQAPGKERELVATIDEGATTNYADSVKGRFTISRDNAKNTVYLQMNSLKPEDTAVYYCAADYTYSVSMYWGQGTQVTVSS

SEQ ID NO: 38043 - protein, 118 aa, Artificial Sequence
  Chemically Synthesized
QVQLQESGGGLVQAGGSLRLSCAASGNIFGYYYMGWYRQAPGKEREFVATIAWGTNTYYADSVKGRFTISRDNAKNTVYLQMNSLKPEDTAVYYCAAYITAYRLHAYWGQGTQVTVSS

SEQ ID NO: 38044 - protein, 118 aa, Artificial Sequence
  Chemically Synthesized
QVQLQESGGGLVQAGGSLRLSCAASGYIFYGGVMGWYRQAPGKERELVAGIDEGSITYYADSVKGRFTISRDNAKNTVYLQMNSLKPEDTAVYYCAAYGQDDGRLDYWGQGTQVTVSS

SEQ ID NO: 38045 - protein, 125 aa, Artificial Sequence
  Chemically Synthesized
QVQLQESGGGLVQAGGSLRLSCAASGNISTLNMGWYRQAPGKERELVAAIGRGSTTYYADSVKGRFTISRDNAKNTVYLQMNSLKPEDTAVYYCAVYTANVDVWDYDVAIYYLYWGQGTQVTVSS

SEQ ID NO: 38046 - protein, 118 aa, Artificial Sequence
  Chemically Synthesized
QVQLQESGGGLVQAGGSLRLSCAASGTIFRYRIMGWYRQAPGKERELVAAIDKGAITYYADSVKGRFTISRDNAKNTVYLQMNSLKPEDTAVYYCAAIGRRVQWLIYWGQGTQVTVSS

SEQ ID NO: 38047 - protein, 115 aa, Artificial Sequence
  Chemically Synthesized
QVQLQESGGGLVQAGGSLRLSCAASGTISDPYYMGWYRQAPGKEREFVATISQGGNTYYADSVKGRFTISRDNAKNTVYLQMNSLKPEDTAVYYCAADLNWHGYWGQGTQVTVSS

SEQ ID NO: 38048 - protein, 122 aa, Artificial Sequence
  Chemically Synthesized
QVQLQESGGGLVQAGGSLRLSCAASGYIFLASYMGWYRQAPGKEREFVASINYGGTTYYADSVKGRFTISRDNAKNTVYLQMNSLKPEDTAVYYCAVIAKGPEILYARYPYWGQGTQVTVSS

SEQ ID NO: 38049 - protein, 117 aa, Artificial Sequence
  Chemically Synthesized
QVQLQESGGGLVQAGGSLRLSCAASGTISRQRHMGWYRQAPGKERELVAAINAGVLPYADSVKGRFTISRDNAKNTVYLQMNSLKPEDTAVYYCAVHLQAHDRHTYWGQGTQVTVSS

SEQ ID NO: 38050 - protein, 126 aa, Artificial Sequence
  Chemically Synthesized
QVQLQESGGGLVQAGGSLRLSCAASGTIFVFQAMGWYRQAPGKERELVATIGYGGTTYYADSVKGRFTISRDNAKNTVYLQMNSLKPEDTAVYYCAVVQRYRVWRVRDDLQFHDYWGQGTQVTVSS

SEQ ID NO: 38051 - protein, 118 aa, Artificial Sequence
  Chemically Synthesized
QVQLQESGGGLVQAGGSLRLSCAASGSISYRGIMGWYRQAPGKEREFVAAISYGTTTNYADSVKGRFTISRDNAKNTVYLQMNSLKPEDTAVYYCAAYFGDYAGLRYWGQGTQVTVSS

SEQ ID NO: 38052 - protein, 114 aa, Artificial Sequence
  Chemically Synthesized
QVQLQESGGGLVQAGGSLRLSCAASGTISTSRYMGWYRQAPGKEREFVAAINSGSTTNYADSVKGRFTISRDNAKNTVYLQMNSLKPEDTAVYYCALGNTTIYWGQGTQVTVSS

SEQ ID NO: 38053 - protein, 122 aa, Artificial Sequence
  Chemically Synthesized
QVQLQESGGGLVQAGGSLRLSCAASGNIFGGLDMGWYRQAPGKERELVAAINVGGTTYYADSVKGRFTISRDNAKNTVYLQMNSLKPEDTAVYYCAAERDDHGASSLRLTYWGQGTQVTVSS

SEQ ID NO: 38054 - protein, 117 aa, Artificial Sequence
  Chemically Synthesized
QVQLQESGGGLVQAGGSLRLSCAASGTISFFGRMGWYRQAPGKEREFVATITRGTSTNYADSVKGRFTISRDNAKNTVYLQMNSLKPEDTAVYYCAAGITYGEGHYWGQGTQVTVSS

SEQ ID NO: 38055 - protein, 125 aa, Artificial Sequence
  Chemically Synthesized
QVQLQESGGGLVQAGGSLRLSCAASGYISRDDTMGWYRQAPGKERELVAAISGGSTTNYADSVKGRFTISRDNAKNTVYLQMNSLKPEDTAVYYCAAEQYLYYYYPDESTFTFYWGQGTQVTVSS

SEQ ID NO: 38056 - protein, 122 aa, Artificial Sequence
  Chemically Synthesized
QVQLQESGGGLVQAGGSLRLSCAASGTISWNDWMGWYRQAPGKERELVASIASGGTTNYADSVKGRFTISRDNAKNTVYLQMNSLKPEDTAVYYCAASEDPYLTDYAGYDYWGQGTQVTVSS

SEQ ID NO: 38057 - protein, 118 aa, Artificial Sequence
  Chemically Synthesized
QVQLQESGGGLVQAGGSLRLSCAASGSISDTLRMGWYRQAPGKEREFVAAISTGASTYYADSVKGRFTISRDNAKNTVYLQMNSLKPEDTAVYYCAAPGTTSARHTYWGQGTQVTVSS

SEQ ID NO: 38058 - protein, 122 aa, Artificial Sequence
  Chemically Synthesized
QVQLQESGGGLVQAGGSLRLSCAASGYISQGLTMGWYRQAPGKERELVASISTGTTTNYADSVKGRFTISRDNAKNTVYLQMNSLKPEDTAVYYCAADDIYGYLYVGGYDYWGQGTQVTVSS

SEQ ID NO: 38059 - protein, 118 aa, Artificial Sequence
  Chemically Synthesized
QVQLQESGGGLVQAGGSLRLSCAASGSISSYESMGWYRQAPGKERELVASITYGGITYYADSVKGRFTISRDNAKNTVYLQMNSLKPEDTAVYYCAVYVGHVPDYDYWGQGTQVTVSS

SEQ ID NO: 38060 - protein, 117 aa, Artificial Sequence
  Chemically Synthesized
QVQLQESGGGLVQAGGSLRLSCAASGTMMGWYRQAPGKERELVAAITDGAITYYADSVKGRFTISRDNAKNTVYLQMNSLKPEDTAVYYCAAYRDDARAYANIFGYWGQGTQVTVSS

SEQ ID NO: 38061 - protein, 118 aa, Artificial Sequence
  Chemically Synthesized
QVQLQESGGGLVQAGGSLRLSCAASGTIFYLYYMGWYRQAPGKEREFVATIANGAITNYADSVKGRFTISRDNAKNTVYLQMNSLKPEDTAVYYCAVLSVGCTNSIYWGQGTQVTVSS

SEQ ID NO: 38062 - protein, 117 aa, Artificial Sequence
  Chemically Synthesized
QVQLQESGGGLVQAGGSLRLSCAASGNISPYTMGWYRQAPGKERELVATIAFGSITNYADSVKGRFTISRDNAKNTVYLQMNSLKPEDTAVYYCAAVVRSRHYLDYWGQGTQVTVSS

SEQ ID NO: 38063 - protein, 122 aa, Artificial Sequence
  Chemically Synthesized
QVQLQESGGGLVQAGGSLRLSCAASGYIFLYQPMGWYRQAPGKERELVAAIDNGSNTYYADSVKGRFTISRDNAKNTVYLQMNSLKPEDTAVYYCAVYDVYRDGGYSPFQYWGQGTQVTVSS

SEQ ID NO: 38064 - protein, 118 aa, Artificial Sequence
  Chemically Synthesized
QVQLQESGGGLVQAGGSLRLSCAASGSISRTENMGWYRQAPGKEREFVAAIAYGSITNYADSVKGRFTISRDNAKNTVYLQMNSLKPEDTAVYYCAADVSGYGLLPYWGQGTQVTVSS

SEQ ID NO: 38065 - protein, 118 aa, Artificial Sequence
  Chemically Synthesized
QVQLQESGGGLVQAGGSLRLSCAASGTIFSGLIMGWYRQAPGKERELVATITGGTSTYYADSVKGRFTISRDNAKNTVYLQMNSLKPEDTAVYYCAAFTDAVIGYDYWGQGTQVTVSS

SEQ ID NO: 38066 - protein, 125 aa, Artificial Sequence
  Chemically Synthesized
QVQLQESGGGLVQAGGSLRLSCAASGYIFDPAVMGWYRQAPGKERELVATIAAGTTTNYADSVKGRFTISRDNAKNTVYLQMNSLKPEDTAVYYCAVDHARYNRTSGASSVTLYWGQGTQVTVSS

SEQ ID NO: 38067 - protein, 118 aa, Artificial Sequence
  Chemically Synthesized
QVQLQESGGGLVQAGGSLRLSCAASGNISITAWMGWYRQAPGKERELVASINNGGITYYADSVKGRFTISRDNAKNTVYLQMNSLKPEDTAVYYCAVHILHSPTHAYWGQGTQVTVSS

SEQ ID NO: 38068 - protein, 117 aa, Artificial Sequence
  Chemically Synthesized
QVQLQESGGGLVQAGGSLRLSCAASGTIFDPVNMGWYRQAPGKERELVAGIDYGSITNYADSVKGRFTISRDNAKNTVYLQMNSLKPEDTAVYYCAAYEFVTPTIYWGQGTQVTVSS

SEQ ID NO: 38069 - protein, 118 aa, Artificial Sequence
  Chemically Synthesized
QVQLQESGGGLVQAGGSLRLSCAASGNIFSYVIMGWYRQAPGKEREFVASINAGGSTYYADSVKGRFTISRDNAKNTVYLQMNSLKPEDTAVYYCAVLWGGADYHPYWGQGTQVTVSS

SEQ ID NO: 38070 - protein, 118 aa, Artificial Sequence
  Chemically Synthesized
QVQLQESGGGLVQAGGSLRLSCAASGYIFNYYYMGWYRQAPGKERELVASIGLGGITYYADSVKGRFTISRDNAKNTVYLQMNSLKPEDTAVYYCAVFEDALRSFDYWGQGTQVTVSS

SEQ ID NO: 38071 - protein, 117 aa, Artificial Sequence
  Chemically Synthesized
QVQLQESGGGLVQAGGSLRLSCAASGNISYPPSMGWYRQAPGKERELVATITDGGITYYADSVKGRFTISRDNAKNTVYLQMNSLKPEDTAVYYCAADDPRYSLMYWGQGTQVTVSS

SEQ ID NO: 38072 - protein, 127 aa, Artificial Sequence
  Chemically Synthesized
QVQLQESGGGLVQAGGSLRLSCAASGYIFYYVYRMGWYRQAPGKEREFVAGIANGTSTYYADSVKGRFTISRDNAKNTVYLQMNSLKPEDTAVYYCAAGDWWYSWYVPYWRYYHRYWGQGTQVTVSS

SEQ ID NO: 38073 - protein, 118 aa, Artificial Sequence
  Chemically Synthesized
QVQLQESGGGLVQAGGSLRLSCAASGTIFYPTYMGWYRQAPGKEREFVAAITHGSTTYYADSVKGRFTISRDNAKNTVYLQMNSLKPEDTAVYYCAAVIDYWFYFRYWGQGTQVTVSS

SEQ ID NO: 38074 - protein, 118 aa, Artificial Sequence
  Chemically Synthesized
QVQLQESGGGLVQAGGSLRLSCAASGTIFVYVGMGWYRQAPGKERELVATIAFGSSTNYADSVKGRFTISRDNAKNTVYLQMNSLKPEDTAVYYCAADSYAAPYLAYWGQGTQVTVSS

SEQ ID NO: 38075 - protein, 118 aa, Artificial Sequence
  Chemically Synthesized
QVQLQESGGGLVQAGGSLRLSCAASGTISFDKPMGWYRQAPGKERELVAGIAVGGNTYYADSVKGRFTISRDNAKNTVYLQMNSLKPEDTAVYYCAVYERYGDDLYYWGQGTQVTVSS

SEQ ID NO: 38076 - protein, 117 aa, Artificial Sequence
  Chemically Synthesized
QVQLQESGGGLVQAGGSLRLSCAASGSILTLSMGWYRQAPGKEREFVAAIAYGGITNYADSVKGRFTISRDNAKNTVYLQMNSLKPEDTAVYYCAAGWRSTYYLAYWGQGTQVTVSS

SEQ ID NO: 38077 - protein, 124 aa, Artificial Sequence
  Chemically Synthesized
QVQLQESGGGLVQAGGSLRLSCAASGTISYTTNMGWYRQAPGKEREFVASISSVVVPYADSVKGRFTISRDNAKNTVYLQMNSLKPEDTAVYYCAAVYDEVGSRVVSVLSCLYWGQGTQVTVSS

SEQ ID NO: 38078 - protein, 125 aa, Artificial Sequence
  Chemically Synthesized
QVQLQESGGGLVQAGGSLRLSCAASGNIFKYAYMGWYRQAPGKERELVAGITVGASTNYADSVKGRFTISRDNAKNTVYLQMNSLKPEDTAVYYCAAGANEGSYAAYTTSLSLYWGQGTQVTVSS

SEQ ID NO: 38079 - protein, 118 aa, Artificial Sequence
  Chemically Synthesized
QVQLQESGGGLVQAGGSLRLSCAASGSISQDWDMGWYRQAPGKERELVASIDGGATTYYADSVKGRFTISRDNAKNTVYLQMNSLKPEDTAVYYCAAYYLPYHYYSYWGQGTQVTVSS

SEQ ID NO: 38080 - protein, 118 aa, Artificial Sequence
  Chemically Synthesized
QVQLQESGGGLVQAGGSLRLSCAASGNIFDTPVMGWYRQAPGKERELVATISSGTSTYYADSVKGRFTISRDNAKNTVYLQMNSLKPEDTAVYYCAVYGRFYPLFDYWGQGTQVTVSS

SEQ ID NO: 38081 - protein, 117 aa, Artificial Sequence
  Chemically Synthesized
QVQLQESGGGLVQAGGSLRLSCAASGNISLNYPMGWYRQAPGKERELLPVLLLVLVPYADSVKGRFTISRDNAKNTVYLQMNSLKPEDTAVYYCAVYRYDQEWHYYWGQGTQVTVSS

SEQ ID NO: 38082 - protein, 122 aa, Artificial Sequence
  Chemically Synthesized
QVQLQESGGGLVQAGGSLRLSCAASGTISDPTYMGWYRQAPGKEREFVAGIGYGGNTNYADSVKGRFTISRDNAKNTVYLQMNSLKPEDTAVYYCAVVYRTWYSYIKWHAYWGQGTQVTVSS

SEQ ID NO: 38083 - protein, 121 aa, Artificial Sequence
  Chemically Synthesized
QVQLQESGGGLVQAGGSLRLSCAASGNIYFPSMGWYRQAPGKERELVAGISRGGITYYADSVKGRFTISRDNAKNTVYLQMNSLKPEDTAVYYCAAYAYYTYSSDPDYRYWGQGTQVTVSS

SEQ ID NO: 38084 - protein, 117 aa, Artificial Sequence
  Chemically Synthesized
QVQLQESGGGLVQAGGSLRLSCAASGYISYPYTMGWYRQAPGKERELVASIDWGTITNYADSVKGRFTISRDNAKNTVYLQMNSLKPEDTAVYYCAVDDYYNDHGYWGQGTQVTVSS

SEQ ID NO: 38085 - protein, 126 aa, Artificial Sequence
  Chemically Synthesized
QVQLQESGGGLVQAGGSLRLSCAASGSISRTDTMGWYRQAPGKERELVATISSGASTNYADSVKGRFTISRDNAKNTVYLQMNSLKPEDTAVYYCAVNGDYSLRTTKTLLNVYYYWGQGTQVTVSS

SEQ ID NO: 38086 - protein, 118 aa, Artificial Sequence
  Chemically Synthesized
QVQLQESGGGLVQAGGSLRLSCAASGNIFQLYYMGWYRQAPGKERELVAAINYGGTTYYADSVKGRFTISRDNAKNTVYLQMNSLKPEDTAVYYCAAGLLFYSYLYYWGQGTQVTVSS

SEQ ID NO: 38087 - protein, 118 aa, Artificial Sequence
  Chemically Synthesized
QVQLQESGGGLVQAGGSLRLSCAASGSISDGYIMGWYRQAPGKEREFVAGIAWGTTTNYADSVKGRFTISRDNAKNTVYLQMNSLKPEDTAVYYCAAYRVPVYRHTYWGQGTQVTVSS

SEQ ID NO: 38088 - protein, 118 aa, Artificial Sequence
  Chemically Synthesized
QVQLQESGGGLVQAGGSLRLSCAASGYISHLDYMGWYRQAPGKERELVAAINGGSTTYYADSVKGRFTISRDNAKNTVYLQMNSLKPEDTAVYYCAALPLHFHSHSYWGQGTQVTVSS

SEQ ID NO: 38089 - protein, 117 aa, Artificial Sequence
  Chemically Synthesized
QVQLQESGGGLVQAGGSLRLSCAASGSISYLWRMGWYRQAPGKERELVPLLMLVLVPYADSVKGRFTISRDNAKNTVYLQMNSLKPEDTAVYYCAAISYDDIEHLYWGQGTQVTVSS

SEQ ID NO: 38090 - protein, 122 aa, Artificial Sequence
  Chemically Synthesized
QVQLQESGGGLVQAGGSLRLSCAASGYIFTRYTMGWYRQAPGKEREFVATISGGASTNYADSVKGRFTISRDNAKNTVYLQMNSLKPEDTAVYYCAADPEYQPYPHAVYDYWGQGTQVTVSS

SEQ ID NO: 38091 - protein, 124 aa, Artificial Sequence
  Chemically Synthesized
QVQLQESGGGLVQAGGSLRLSCAASGNISQSYRMGWYRQAPGKERELVATIAVLIPYADSVKGRFTISRDNAKNTVYLQMNSLKPEDTAVYYCAAGGVHYWWSYANSLSVLGYWGQGTQVTVSS

SEQ ID NO: 38092 - protein, 118 aa, Artificial Sequence
  Chemically Synthesized
QVQLQESGGGLVQAGGSLRLSCAASGNISYHYLMGWYRQAPGKEREFVAGIGVGANTNYADSVKGRFTISRDNAKNTVYLQMNSLKPEDTAVYYCAANGYWRKYLTYWGQGTQVTVSS

SEQ ID NO: 38093 - protein, 116 aa, Artificial Sequence
  Chemically Synthesized
QVQLQESGGGLVQAGGSLRLSCAASGSISGGSYMGWYRQAPGKERELVAGIGAGATTYYADSVKGRFTISRDNAKNTVYLQMNSLKPEDTAVYYCAVPEWAQVSYWGQGTQVTVSS

SEQ ID NO: 38094 - protein, 110 aa, Artificial Sequence
  Chemically Synthesized
QVQLQESGGGLVQAGGSLRLSCAASGNISQGTWMGWYRQAPGKEREFVASITVGANTYYADSVKGRFTISRDNAKNTVYLQMNSLKPEDTAVYYCALQYWGQGTQVTVSS

SEQ ID NO: 38095 - protein, 122 aa, Artificial Sequence
  Chemically Synthesized
QVQLQESGGGLVQAGGSLRLSCAASGYIFDGVGMGWYRQAPGKERELVAGIDYGTITYYADSVKGRFTISRDNAKNTVYLQMNSLKPEDTAVYYCAAWLRFLEDYADKFPYWGQGTQVTVSS

SEQ ID NO: 38096 - protein, 125 aa, Artificial Sequence
  Chemically Synthesized
QVQLQESGGGLVQAGGSLRLSCAASGNIFLYTTMGWYRQAPGKERELVAAIAYGTITYYADSVKGRFTISRDNAKNTVYLQMNSLKPEDTAVYYCAAYDYYAPGRPDYKSLTLYWGQGTQVTVSS

SEQ ID NO: 38097 - protein, 118 aa, Artificial Sequence
  Chemically Synthesized
QVQLQESGGGLVQAGGSLRLSCAASGTIFRYVYMGWYRQAPGKERELVAAITIGSTTYYADSVKGRFTISRDNAKNTVYLQMNSLKPEDTAVYYCAVLDYLVYQYKYWGQGTQVTVSS

SEQ ID NO: 38098 - protein, 116 aa, Artificial Sequence
  Chemically Synthesized
QVQLQESGGGLVQAGGSLRLSCAASGNIFSGDNMGWYRQAPGKERELVAAISYGASTNYADSVKGRFTISRDNAKNTVYLQMNSLKPEDTAVYYCAVSPYDVHNYWGQGTQVTVSS

SEQ ID NO: 38099 - protein, 118 aa, Artificial Sequence
  Chemically Synthesized
QVQLQESGGGLVQAGGSLRLSCAASGYIFTYADMGWYRQAPGKERELVAGITFGASTYYADSVKGRFTISRDNAKNTVYLQMNSLKPEDTAVYYCAVYFRHYTPHGYWGQGTQVTVSS

SEQ ID NO: 38100 - protein, 121 aa, Artificial Sequence
  Chemically Synthesized
QVQLQESGGGLVQAGGSLRLSCAASGSIFQVSYMGWYRQAPGKEREFVATIADGGTTYYADSVKGRFTISRDNAKNTVYLQMNSLKPEDTAVYYCAVRGVYRDGGSVLIYWGQGTQVTVSS

SEQ ID NO: 38101 - protein, 125 aa, Artificial Sequence
  Chemically Synthesized
QVQLQESGGGLVQAGGSLRLSCAASGTISNYPIMGWYRQAPGKEREFVASIGNGSNTYYADSVKGRFTISRDNAKNTVYLQMNSLKPEDTAVYYCAANPGDEPGFLPNAPYHDYWGQGTQVTVSS

SEQ ID NO: 38102 - protein, 118 aa, Artificial Sequence
  Chemically Synthesized
QVQLQESGGGLVQAGGSLRLSCAASGSISQDGDMGWYRQAPGKERELVASISVGTTTYYADSVKGRFTISRDNAKNTVYLQMNSLKPEDTAVYYCAVYHNVGDYLLYWGQGTQVTVSS

SEQ ID NO: 38103 - protein, 118 aa, Artificial Sequence
  Chemically Synthesized
QVQLQESGGGLVQAGGSLRLSCAASGSISAYLRMGWYRQAPGKERELVASIADGTITYYADSVKGRFTISRDNAKNTVYLQMNSLKPEDTAVYYCAVPPKWALLHDYWGQGTQVTVSS

SEQ ID NO: 38104 - protein, 113 aa, Artificial Sequence
  Chemically Synthesized
QVQLQESGGGLVQAGGSLRLSCAASGNISHINMGWYRQAPGKERELNDGGSTYYADSVKGRFTISRDNAKNTVYLQMNSLKPEDTAVYYCAATTWAYLLHDYWGQGTQVTVSS

SEQ ID NO: 38105 - protein, 118 aa, Artificial Sequence
  Chemically Synthesized
QVQLQESGGGLVQAGGSLRLSCAASGSISARWDMGWYRQAPGKERELVAGIAWGGTTYYADSVKGRFTISRDNAKNTVYLQMNSLKPEDTAVYYCAAGDYDVGYHPYWGQGTQVTVSS

SEQ ID NO: 38106 - protein, 121 aa, Artificial Sequence
  Chemically Synthesized
QVQLQESGGGLVQAGGSLRLSCAASGTISQYYDMGWYRQAPGKEREFVAAIGRGATTYADSVKGRFTISRDNAKNTVYLQMNSLKPEDTAVYYCAAYTYGYFTDDWWYLYWGQGTQVTVSS

SEQ ID NO: 38107 - protein, 118 aa, Artificial Sequence
  Chemically Synthesized
QVQLQESGGGLVQAGGSLRLSCAASGSIFWLRVMGWYRQAPGKERELVAAIDIGTNTNYADSVKGRFTISRDNAKNTVYLQMNSLKPEDTAVYYCAVYRRNDFPFRYWGQGTQVTVSS

SEQ ID NO: 38108 - protein, 122 aa, Artificial Sequence
  Chemically Synthesized
QVQLQESGGGLVQAGGSLRLSCAASGTISTPTRMGWYRQAPGKERELVAGIAIGGSTYYADSVKGRFTISRDNAKNTVYLQMNSLKPEDTAVYYCAAFNGDGYIDVVPLAYWGQGTQVTVSS

SEQ ID NO: 38109 - protein, 126 aa, Artificial Sequence
  Chemically Synthesized
QVQLQESGGGLVQAGGSLRLSCAASGTIFVVADMGWYRQAPGKEREFVAAITYGTTTYYADSVKGRFTISRDNAKNTVYLQMNSLKPEDTAVYYCAVNYYWSDLSLFYGFRQHAYWGQGTQVTVSS

SEQ ID NO: 38110 - protein, 118 aa, Artificial Sequence
  Chemically Synthesized
QVQLQESGGGLVQAGGSLRLSCAASGYISYAYVMGWYRQAPGKERELVATIALGTTTNYADSVKGRFTISRDNAKNTVYLQMNSLKPEDTAVYYCAVNSYPKYALGYWGQGTQVTVSS

SEQ ID NO: 38111 - protein, 125 aa, Artificial Sequence
  Chemically Synthesized
QVQLQESGGGLVQAGGSLRLSCAASGTIFTHYIMGWYRQAPGKEREFVAGIGSVLLPYADSVKGRFTISRDNAKNTVYLQMNSLKPEDTAVYYCAVQRVWDLQYYQYRDTSLDYWGQGTQVTVSS

SEQ ID NO: 38112 - protein, 122 aa, Artificial Sequence
  Chemically Synthesized
QVQLQESGGGLVQAGGSLRLSCAASGSISYAIRMGWYRQAPGKERELVATIGVGGSTNYADSVKGRFTISRDNAKNTVYLQMNSLKPEDTAVYYCAVADYRDPRLDIQYRYWGQGTQVTVSS

SEQ ID NO: 38113 - protein, 118 aa, Artificial Sequence
  Chemically Synthesized
QVQLQESGGGLVQAGGSLRLSCAASGTISYYTPMGWYRQAPGKEREFVAAIGYGTITYYADSVKGRFTISRDNAKNTVYLQMNSLKPEDTAVYYCAALPFRSVWLYYWGQGTQVTVSS

SEQ ID NO: 38114 - protein, 126 aa, Artificial Sequence
  Chemically Synthesized
QVQLQESGGGLVQAGGSLRLSCAASGTISYSPGMGWYRQAPGKERELVAAITYGTNTNYADSVKGRFTISRDNAKNTVYLQMNSLKPEDTAVYYCAVGSLYVLRADAPYRLRLGYWGQGTQVTVSS

SEQ ID NO: 38115 - protein, 114 aa, Artificial Sequence
  Chemically Synthesized
QVQLQESGGGLVQAGGSLRLSCAASGYIFPWINMGWYRQAPGKERELVATINSGTITYYADSVKGRFTISRDNAKNTVYLQMNSLKPEDTAVYYCAEDHVFRYWGQGTQVTVSS

SEQ ID NO: 38116 - protein, 118 aa, Artificial Sequence
  Chemically Synthesized
QVQLQESGGGLVQAGGSLRLSCAASGTISGPFYMGWYRQAPGKERELVAGIADGGSTYYADSVKGRFTISRDNAKNTVYLQMNSLKPEDTAVYYCAVARWLKGILRYWGQGTQVTVSS

SEQ ID NO: 38117 - protein, 115 aa, Artificial Sequence
  Chemically Synthesized
QVQLQESGGGLVQAGGSLRLSCAASGNISNGTAMGWYRQAPGKEREFVAAISNGATTNYADSVKGRFTISRDNAKNTVYLQMNSLKPEDTAVYYCAAGAVWYAYWGQGTQVTVSS

SEQ ID NO: 38118 - protein, 116 aa, Artificial Sequence
  Chemically Synthesized
QVQLQESGGGLVQAGGSLRLSCAASGSISLDTGMGWYRQAPGKEREFVASITDGANTYYADSVKGRFTISRDNAKNTVYLQMNSLKPEDTAVYYCAVGTGGSLIYWGQGTQVTVSS

SEQ ID NO: 38119 - protein, 110 aa, Artificial Sequence
  Chemically Synthesized
QVQLQESGGGLVQAGGSLRLSCAASGNISYLRDMGWYRQAPGKEREFVAAIDQGGTTYYADSVKGRFTISRDNAKNTVYLQMNSLKPEDTAVYYCATIYWGQGTQVTVSS

SEQ ID NO: 38120 - protein, 115 aa, Artificial Sequence
  Chemically Synthesized
QVQLQESGGGLVQAGGSLRLSCAASGNISVAIYMGWYRQAPGKERELVAAIDRGTYADSVKGRFTISRDNAKNTVYLQMNSLKPEDTAVYYCAAPVASARIHPYWGQGTQVTVSS

SEQ ID NO: 38121 - protein, 118 aa, Artificial Sequence
  Chemically Synthesized
QVQLQESGGGLVQAGGSLRLSCAASGSIFEPVYMGWYRQAPGKERELVASIDEGGITYYADSVKGRFTISRDNAKNTVYLQMNSLKPEDTAVYYCAVSGGDTDVLSYWGQGTQVTVSS

SEQ ID NO: 38122 - protein, 117 aa, Artificial Sequence
  Chemically Synthesized
QVQLQESGGGLVQAGGSLRLSCAASGNIFAAFLMGWYRQAPGKEREFVATITYGAITNYADSVKGRFTISRDNAKNTVYLQMNSLKPEDTAVYYCAVYAYTTSYHYWGQGTQVTVSS

SEQ ID NO: 38123 - protein, 117 aa, Artificial Sequence
  Chemically Synthesized
QVQLQESGGGLVQAGGSLRLSCAASGSISDFGYMGWYRQAPGKEREFVPVLITVVIPYADSVKGRFTISRDNAKNTVYLQMNSLKPEDTAVYYCAVGQANNPDHTYWGQGTQVTVSS

SEQ ID NO: 38124 - protein, 122 aa, Artificial Sequence
  Chemically Synthesized
QVQLQESGGGLVQAGGSLRLSCAASGSIFPRVGMGWYRQAPGKEREFVASISYGATTYYADSVKGRFTISRDNAKNTVYLQMNSLKPEDTAVYYCAAYQFGFTPYRARYWYWGQGTQVTVSS

SEQ ID NO: 38125 - protein, 115 aa, Artificial Sequence
  Chemically Synthesized
QVQLQESGGGLVQAGGSLRLSCAASGYIFLSGMGWYRQAPGKEREFVASISDGTITYYADSVKGRFTISRDNAKNTVYLQMNSLKPEDTAVYYCAVDDGDRLSYWGQGTQVTVSS

SEQ ID NO: 38126 - protein, 111 aa, Artificial Sequence
  Chemically Synthesized
QVQLQESGGGLVQAGGSLRLSCAASGSISRLVGMGWYRQAPGKERELVAGPYADSVKGRFTISRDNAKNTVYLQMNSLKPEDTAVYYCAVGRYYPQFFAYWGQGTQVTVSS

SEQ ID NO: 38127 - protein, 108 aa, Artificial Sequence
  Chemically Synthesized
QVQLQESGGGLVQAGGSLRLSCAASGTISPGTRMGWYRQAPGKEREFVAGIVTVLLPYADSVKGRFTISRDNAKNTVYLQMNSLKPEDTAVYYCAVYWGQGTQVTVSS

SEQ ID NO: 38128 - protein, 118 aa, Artificial Sequence
  Chemically Synthesized
QVQLQESGGGLVQAGGSLRLSCAASGTIFLRTYMGWYRQAPGKERELVATINQGAITYYADSVKGRFTISRDNAKNTVYLQMNSLKPEDTAVYYCAVNSRAQDDFTYWGQGTQVTVSS

SEQ ID NO: 38129 - protein, 121 aa, Artificial Sequence
  Chemically Synthesized
QVQLQESGGGLVQAGGSLRLSCAASGTISEPSYMGWYRQAPGKERELVAGISYGTNTYYADSVKGRFTISRDNAKNTVYLQMNSLKPEDTAVYYCAAVDTDCSVMLLFIYWGQGTQVTVSS

SEQ ID NO: 38130 - protein, 118 aa, Artificial Sequence
  Chemically Synthesized
QVQLQESGGGLVQAGGSLRLSCAASGNISGRQYMGWYRQAPGKEREFVAGIDTGGNTYYADSVKGRFTISRDNAKNTVYLQMNSLKPEDTAVYYCAVDVYDGGGHPYWGQGTQVTVSS

SEQ ID NO: 38131 - protein, 122 aa, Artificial Sequence
  Chemically Synthesized
QVQLQESGGGLVQAGGSLRLSCAASGNIFHLVYMGWYRQAPGKERELVAAIAWGGSTNYADSVKGRFTISRDNAKNTVYLQMNSLKPEDTAVYYCAADDGYYYDVYITHYYWGQGTQVTVSS

SEQ ID NO: 38132 - protein, 126 aa, Artificial Sequence
  Chemically Synthesized
QVQLQESGGGLVQAGGSLRLSCAASGTISYTDTMGWYRQAPGKERELVAAINDGSSTYYADSVKGRFTISRDNAKNTVYLQMNSLKPEDTAVYYCAVGVSDTYDFWSSGYVAHAYWGQGTQVTVSS

SEQ ID NO: 38133 - protein, 118 aa, Artificial Sequence
  Chemically Synthesized
QVQLQESGGGLVQAGGSLRLSCAASGSIFGWRHMGWYRQAPGKERELVATIGGGASTYYADSVKGRFTISRDNAKNTVYLQMNSLKPEDTAVYYCAARRYWVDAYRYWGQGTQVTVSS

SEQ ID NO: 38134 - protein, 118 aa, Artificial Sequence
  Chemically Synthesized
QVQLQESGGGLVQAGGSLRLSCAASGNIFDRNLMGWYRQAPGKERELVAGINYGGNTNYADSVKGRFTISRDNAKNTVYLQMNSLKPEDTAVYYCAAAVLEWSIHDYWGQGTQVTVSS

SEQ ID NO: 38135 - protein, 117 aa, Artificial Sequence
  Chemically Synthesized
QVQLQESGGGLVQAGGSLRLSCAASGNISRTLDMGWYRQAPGKEREFLPINFGTTTNYADSVKGRFTISRDNAKNTVYLQMNSLKPEDTAVYYCAVLLGFGPQHDYWGQGTQVTVSS

SEQ ID NO: 38136 - protein, 122 aa, Artificial Sequence
  Chemically Synthesized
QVQLQESGGGLVQAGGSLRLSCAASGYIFNPFVMGWYRQAPGKEREFVAAISQGGNTYYADSVKGRFTISRDNAKNTVYLQMNSLKPEDTAVYYCAAAYGYASGPRIVHDYWGQGTQVTVSS

SEQ ID NO: 38137 - protein, 126 aa, Artificial Sequence
  Chemically Synthesized
QVQLQESGGGLVQAGGSLRLSCAASGTISGAGKMGWYRQAPGKERELVASIDYGSNTYYADSVKGRFTISRDNAKNTVYLQMNSLKPEDTAVYYCAVWYSFSHTEDTDTYVIHAYWGQGTQVTVSS

SEQ ID NO: 38138 - protein, 122 aa, Artificial Sequence
  Chemically Synthesized
QVQLQESGGGLVQAGGSLRLSCAASGSISIIWLMGWYRQAPGKERELVASISGGSTTYYADSVKGRFTISRDNAKNTVYLQMNSLKPEDTAVYYCAAASRVDWDYYDQYYYWGQGTQVTVSS

SEQ ID NO: 38139 - protein, 118 aa, Artificial Sequence
  Chemically Synthesized
QVQLQESGGGLVQAGGSLRLSCAASGTIFGSGQMGWYRQAPGKERELVASITAGTITYYADSVKGRFTISRDNAKNTVYLQMNSLKPEDTAVYYCAADYGPNWTYSYWGQGTQVTVSS

SEQ ID NO: 38140 - protein, 114 aa, Artificial Sequence
  Chemically Synthesized
QVQLQESGGGLVQAGGSLRLSCAASGYISAPGFMGWYRQAPGKERELVAAISGGANTYYADSVKGRFTISRDNAKNTVYLQMNSLKPEDTAVYYCAVGVDDRYWGQGTQVTVSS

SEQ ID NO: 38141 - protein, 122 aa, Artificial Sequence
  Chemically Synthesized
QVQLQESGGGLVQAGGSLRLSCAASGYISHYYSMGWYRQAPGKERELVATIGYGAITYYADSVKGRFTISRDNAKNTVYLQMNSLKPEDTAVYYCAVYADAGDVDYYHHGYWGQGTQVTVSS

SEQ ID NO: 38142 - protein, 122 aa, Artificial Sequence
  Chemically Synthesized
QVQLQESGGGLVQAGGSLRLSCAASGNIFQWYSMGWYRQAPGKERELVATITGGTTTNYADSVKGRFTISRDNAKNTVYLQMNSLKPEDTAVYYCAVAYTVPRVIGLPHEYWGQGTQVTVSS

SEQ ID NO: 38143 - protein, 118 aa, Artificial Sequence
  Chemically Synthesized
QVQLQESGGGLVQAGGSLRLSCAASGNISRRKGMGWYRQAPGKERELVASITYGTITNYADSVKGRFTISRDNAKNTVYLQMNSLKPEDTAVYYCAVYVRWEYPHKYWGQGTQVTVSS

SEQ ID NO: 38144 - protein, 117 aa, Artificial Sequence
  Chemically Synthesized
QVQLQESGGGLVQAGGSLRLSCAASGSIFDDRQMGWYRQAPGKERELVAGIADGASTNYADSVKGRFTISRDNAKNTVYLQMNSLKPEDTAVYYCADPVSWWLPSYWGQGTQVTVSS

SEQ ID NO: 38145 - protein, 118 aa, Artificial Sequence
  Chemically Synthesized
QVQLQESGGGLVQAGGSLRLSCAASGNISDLPGMGWYRQAPGKEREFVASITDGATTNYADSVKGRFTISRDNAKNTVYLQMNSLKPEDTAVYYCAVYNVDARYFGYWGQGTQVTVSS

SEQ ID NO: 38146 - protein, 117 aa, Artificial Sequence
  Chemically Synthesized
QVQLQESGGGLVQAGGSLRLSCAASGTISVHSYMGWYRQAPGKEREFVAGISAGTSTNYADSVKGRFTISRDNAKNTVYLQMNSLKPEDTAVYYCAVGSIPFDHDYWGQGTQVTVSS

SEQ ID NO: 38147 - protein, 115 aa, Artificial Sequence
  Chemically Synthesized
QVQLQESGGGLVQAGGSLRLSCAASGTIFAVAYMGWYRQAPGKEREFVAAIGYGATTYYADSVKGRFTISRDNAKNTVYLQMNSLKPEDTAVYYCAVYYVLLGYWGQGTQVTVSS

SEQ ID NO: 38148 - protein, 122 aa, Artificial Sequence
  Chemically Synthesized
QVQLQESGGGLVQAGGSLRLSCAASGSISYLAWMGWYRQAPGKERELVATITSGSTTYYADSVKGRFTISRDNAKNTVYLQMNSLKPEDTAVYYCAAGRDVHGYSIDVHPYWGQGTQVTVSS

SEQ ID NO: 38149 - protein, 122 aa, Artificial Sequence
  Chemically Synthesized
QVQLQESGGGLVQAGGSLRLSCAASGNISFAQSMGWYRQAPGKERELVATIDYGGTTNYADSVKGRFTISRDNAKNTVYLQMNSLKPEDTAVYYCAVDGVVFYYGDKVHVYWGQGTQVTVSS

SEQ ID NO: 38150 - protein, 126 aa, Artificial Sequence
  Chemically Synthesized
QVQLQESGGGLVQAGGSLRLSCAASGNIFDVGNMGWYRQAPGKERELVATIAYGSSTNYADSVKGRFTISRDNAKNTVYLQMNSLKPEDTAVYYCAVRGASYQWVYPQVTDYLRYWGQGTQVTVSS

SEQ ID NO: 38151 - protein, 122 aa, Artificial Sequence
  Chemically Synthesized
QVQLQESGGGLVQAGGSLRLSCAASGNISPDVTMGWYRQAPGKERELVAAINWGTSTYYADSVKGRFTISRDNAKNTVYLQMNSLKPEDTAVYYCAADGDVTYAKVAVHAYWGQGTQVTVSS

SEQ ID NO: 38152 - protein, 116 aa, Artificial Sequence
  Chemically Synthesized
QVQLQESGGGLVQAGGSLRLSCAASGTISNEFDMGWYRQAPGKERELVPLLVRVVLPYADSVKGRFTISRDNAKNTVYLQMNSLKPEDTAVYYCAAVYWTLYHYYWGQGTQVTVSS

SEQ ID NO: 38153 - protein, 118 aa, Artificial Sequence
  Chemically Synthesized
QVQLQESGGGLVQAGGSLRLSCAASGTIFYYSVMGWYRQAPGKEREFVASIDDGSTTNYADSVKGRFTISRDNAKNTVYLQMNSLKPEDTAVYYCAVTSYNRHPYPYWGQGTQVTVSS

SEQ ID NO: 38154 - protein, 115 aa, Artificial Sequence
  Chemically Synthesized
QVQLQESGGGLVQAGGSLRLSCAASGTISYALYMGWYRQAPGKERELVAGIGFGATTYYADSVKGRFTISRDNAKNTVYLQMNSLKPEDTAVYYCAVYGVYHDYWGQGTQVTVSS

SEQ ID NO: 38155 - protein, 116 aa, Artificial Sequence
  Chemically Synthesized
QVQLQESGGGLVQAGGSLRLSCAASGTISNARWMGWYRQAPGKERELVASITHGGSTNYADSVKGRFTISRDNAKNTVYLQMNSLKPEDTAVYYCAVYESVAHSYWGQGTQVTVSS

SEQ ID NO: 38156 - protein, 118 aa, Artificial Sequence
  Chemically Synthesized
QVQLQESGGGLVQAGGSLRLSCAASGNISGRGLMGWYRQAPGKERELVAAITGGANTYYADSVKGRFTISRDNAKNTVYLQMNSLKPEDTAVYYCAVGRRRYLYHYYWGQGTQVTVSS

SEQ ID NO: 38157 - protein, 117 aa, Artificial Sequence
  Chemically Synthesized
QVQLQESGGGLVQAGGSLRLSCAASGSISAVFYMGWYRQAPGKERELVPVLVTATTYYADSVKGRFTISRDNAKNTVYLQMNSLKPEDTAVYYCAVLVDWGYKHEYWGQGTQVTVSS

SEQ ID NO: 38158 - protein, 126 aa, Artificial Sequence
  Chemically Synthesized
QVQLQESGGGLVQAGGSLRLSCAASGTISDPSYMGWYRQAPGKERELVAGIDLGGTTNYADSVKGRFTISRDNAKNTVYLQMNSLKPEDTAVYYCAAARLYDTYSYYGTRAKFGYWGQGTQVTVSS

SEQ ID NO: 38159 - protein, 122 aa, Artificial Sequence
  Chemically Synthesized
QVQLQESGGGLVQAGGSLRLSCAASGYISPAYYMGWYRQAPGKEREFVASISYGSITYYADSVKGRFTISRDNAKNTVYLQMNSLKPEDTAVYYCAVDFIIFFPRWWYHYYWGQGTQVTVSS

SEQ ID NO: 38160 - protein, 109 aa, Artificial Sequence
  Chemically Synthesized
QVQLQESGGGLVQAGGSLRLSCAASGSISSLYMGWYRQAPGKEREFALGGNTYYADSVKGRFTISRDNAKNTVYLQMNSLKPEDTAVYYCAVGDYHEYWGQGTQVTVSS

SEQ ID NO: 38161 - protein, 123 aa, Artificial Sequence
  Chemically Synthesized
QVQLQESGGGLVQAGGSLRLSCAASGYIFGPFLMGWYRQAPGKEREFVAAIGYGGNTYYADSVKGRFTISRDNAKNTVYLQMNSLKPEDTAVYYCAVRVTSRPKDDYAAYVYWGQGTQVTVSS

SEQ ID NO: 38162 - protein, 118 aa, Artificial Sequence
  Chemically Synthesized
QVQLQESGGGLVQAGGSLRLSCAASGTISYRWGMGWYRQAPGKERELVASIAYGGNTYYADSVKGRFTISRDNAKNTVYLQMNSLKPEDTAVYYCAVYDRDDTNHYYWGQGTQVTVSS

SEQ ID NO: 38163 - protein, 126 aa, Artificial Sequence
  Chemically Synthesized
QVQLQESGGGLVQAGGSLRLSCAASGNISARYVMGWYRQAPGKERELVAAIGVGAITYYADSVKGRFTISRDNAKNTVYLQMNSLKPEDTAVYYCAATPYPDLYGFVRAQYILRYWGQGTQVTVSS

SEQ ID NO: 38164 - protein, 118 aa, Artificial Sequence
  Chemically Synthesized
QVQLQESGGGLVQAGGSLRLSCAASGYIFREAIMGWYRQAPGKERELVAAIAGGTTTNYADSVKGRFTISRDNAKNTVYLQMNSLKPEDTAVYYCAAGFDDLVPYFYWGQGTQVTVSS

SEQ ID NO: 38165 - protein, 122 aa, Artificial Sequence
  Chemically Synthesized
QVQLQESGGGLVQAGGSLRLSCAASGNISYRGAMGWYRQAPGKERELVASIGRGASTNYADSVKGRFTISRDNAKNTVYLQMNSLKPEDTAVYYCAAWYIFYLLTPGLYTYWGQGTQVTVSS

SEQ ID NO: 38166 - protein, 126 aa, Artificial Sequence
  Chemically Synthesized
QVQLQESGGGLVQAGGSLRLSCAASGYISRWRSMGWYRQAPGKEREFVAAISRGTSTYYADSVKGRFTISRDNAKNTVYLQMNSLKPEDTAVYYCAAVWGYTLYYSNHPHAGHSYWGQGTQVTVSS

SEQ ID NO: 38167 - protein, 117 aa, Artificial Sequence
  Chemically Synthesized
QVQLQESGGGLVQAGGSLRLSCAASGTISPVYYMGWYRQAPGKEREFVAGITYGSSTNYADSVKGRFTISRDNAKNTVYLQMNSLKPEDTAVYYCAAIKYGRSHQYWGQGTQVTVSS

SEQ ID NO: 38168 - protein, 118 aa, Artificial Sequence
  Chemically Synthesized
QVQLQESGGGLVQAGGSLRLSCAASGTIFWSWSMGWYRQAPGKERELVATITSGSITYYADSVKGRFTISRDNAKNTVYLQMNSLKPEDTAVYYCAVRYSFRGSHVYWGQGTQVTVSS

SEQ ID NO: 38169 - protein, 122 aa, Artificial Sequence
  Chemically Synthesized
QVQLQESGGGLVQAGGSLRLSCAASGSISTHLPMGWYRQAPGKEREFVAAIAAGASTYYADSVKGRFTISRDNAKNTVYLQMNSLKPEDTAVYYCAVYGGYGSSYAADFHYWGQGTQVTVSS

SEQ ID NO: 38170 - protein, 118 aa, Artificial Sequence
  Chemically Synthesized
QVQLQESGGGLVQAGGSLRLSCAASGYISYDTYMGWYRQAPGKERELVAAIDRGASTYYADSVKGRFTISRDNAKNTVYLQMNSLKPEDTAVYYCAAVTDGDVALGYWGQGTQVTVSS

SEQ ID NO: 38171 - protein, 126 aa, Artificial Sequence
  Chemically Synthesized
QVQLQESGGGLVQAGGSLRLSCAASGSISDVWTMGWYRQAPGKEREFVATISGGSITNYADSVKGRFTISRDNAKNTVYLQMNSLKPEDTAVYYCAVIVGDQDTWRDRRRTYLSYWGQGTQVTVSS

SEQ ID NO: 38172 - protein, 118 aa, Artificial Sequence
  Chemically Synthesized
QVQLQESGGGLVQAGGSLRLSCAASGNIFWWDYMGWYRQAPGKEREFVATIAYGTITNYADSVKGRFTISRDNAKNTVYLQMNSLKPEDTAVYYCAVVNHKQVLLYYWGQGTQVTVSS

SEQ ID NO: 38173 - protein, 122 aa, Artificial Sequence
  Chemically Synthesized
QVQLQESGGGLVQAGGSLRLSCAASGTIFHLFYMGWYRQAPGKERELVATISLGGNTYYADSVKGRFTISRDNAKNTVYLQMNSLKPEDTAVYYCAVGFLVRVAYYDDFDYWGQGTQVTVSS

SEQ ID NO: 38174 - protein, 118 aa, Artificial Sequence
  Chemically Synthesized
QVQLQESGGGLVQAGGSLRLSCAASGTIFDRLYMGWYRQAPGKEREFVASITNGGTTYYADSVKGRFTISRDNAKNTVYLQMNSLKPEDTAVYYCAAGLFDVFNYPYWGQGTQVTVSS

SEQ ID NO: 38175 - protein, 115 aa, Artificial Sequence
  Chemically Synthesized
QVQLQESGGGLVQAGGSLRLSCAASGYIFPYTSMGWYRQAPGKERELVAAIDPGGSTYYADSVKGRFTISRDNAKNTVYLQMNSLKPEDTAVYYCAAYYILSTYWGQGTQVTVSS

SEQ ID NO: 38176 - protein, 122 aa, Artificial Sequence
  Chemically Synthesized
QVQLQESGGGLVQAGGSLRLSCAASGTISHGVWMGWYRQAPGKEREFVAAISYGGITYYADSVKGRFTISRDNAKNTVYLQMNSLKPEDTAVYYCAATFRGRELPFTSHGYWGQGTQVTVSS

SEQ ID NO: 38177 - protein, 122 aa, Artificial Sequence
  Chemically Synthesized
QVQLQESGGGLVQAGGSLRLSCAASGTIFAGTYMGWYRQAPGKERELVATIDPGGSTYYADSVKGRFTISRDNAKNTVYLQMNSLKPEDTAVYYCAAPYYGYAYIDYGLAYWGQGTQVTVSS

SEQ ID NO: 38178 - protein, 126 aa, Artificial Sequence
  Chemically Synthesized
QVQLQESGGGLVQAGGSLRLSCAASGTIFPPGGMGWYRQAPGKERELVAGIANGTTTNYADSVKGRFTISRDNAKNTVYLQMNSLKPEDTAVYYCAAQGGAGTFRAAFLIDTFVYWGQGTQVTVSS

SEQ ID NO: 38179 - protein, 121 aa, Artificial Sequence
  Chemically Synthesized
QVQLQESGGGLVQAGGSLRLSCAASGTISSYVGMGWYRQAPGKEREFVAAITQGATTNYADSVKGRFTISRDNAKNTVYLQMNSLKPEDTAVYYCAARSDWDRSTNLLMYWGQGTQVTVSS

SEQ ID NO: 38180 - protein, 126 aa, Artificial Sequence
  Chemically Synthesized
QVQLQESGGGLVQAGGSLRLSCAASGTIFLARDMGWYRQAPGKERELVAAIGYGAITYYADSVKGRFTISRDNAKNTVYLQMNSLKPEDTAVYYCAVAYYGSDVDGDQNDWFHRYWGQGTQVTVSS

SEQ ID NO: 38181 - protein, 122 aa, Artificial Sequence
  Chemically Synthesized
QVQLQESGGGLVQAGGSLRLSCAASGNIFIQALMGWYRQAPGKEREFVAGIASGSSTNYADSVKGRFTISRDNAKNTVYLQMNSLKPEDTAVYYCAAYTYGSEYTYDTYIYWGQGTQVTVSS

SEQ ID NO: 38182 - protein, 118 aa, Artificial Sequence
  Chemically Synthesized
QVQLQESGGGLVQAGGSLRLSCAASGTIFPYHLMGWYRQAPGKEREFVASISFGAITYYADSVKGRFTISRDNAKNTVYLQMNSLKPEDTAVYYCAVRPPLRYTLDYWGQGTQVTVSS

SEQ ID NO: 38183 - protein, 125 aa, Artificial Sequence
  Chemically Synthesized
QVQLQESGGGLVQAGGSLRLSCAASGSISFGYAMGWYRQAPGKERELVATIGAGGNTYYADSVKGRFTISRDNAKNTVYLQMNSLKPEDTAVYYCAVQSYAFGTLFDSLYGPFYWGQGTQVTVSS

SEQ ID NO: 38184 - protein, 126 aa, Artificial Sequence
  Chemically Synthesized
QVQLQESGGGLVQAGGSLRLSCAASGYIFWYYYMGWYRQAPGKERELVASISWGTITNYADSVKGRFTISRDNAKNTVYLQMNSLKPEDTAVYYCAVERHAFGYDPSGWYIGHRYWGQGTQVTVSS

SEQ ID NO: 38185 - protein, 118 aa, Artificial Sequence
  Chemically Synthesized
QVQLQESGGGLVQAGGSLRLSCAASGYISERKGMGWYRQAPGKEREFVATIDSGANTNYADSVKGRFTISRDNAKNTVYLQMNSLKPEDTAVYYCAAHRWYRYPYWYWGQGTQVTVSS

SEQ ID NO: 38186 - protein, 118 aa, Artificial Sequence
  Chemically Synthesized
QVQLQESGGGLVQAGGSLRLSCAASGSISSWGYMGWYRQAPGKERELVATISYGASTNYADSVKGRFTISRDNAKNTVYLQMNSLKPEDTAVYYCAADVIDWSYHYYWGQGTQVTVSS

SEQ ID NO: 38187 - protein, 126 aa, Artificial Sequence
  Chemically Synthesized
QVQLQESGGGLVQAGGSLRLSCAASGYIFGRTYMGWYRQAPGKEREFVAAISQGSTTYYADSVKGRFTISRDNAKNTVYLQMNSLKPEDTAVYYCAVRYHFIVDALRSTPLKYYYWGQGTQVTVSS

SEQ ID NO: 38188 - protein, 125 aa, Artificial Sequence
  Chemically Synthesized
QVQLQESGGGLVQAGGSLRLSCAASGSIFGPSFMGWYRQAPGKEREFVATIAGGSSTYYADSVKGRFTISRDNAKNTVYLQMNSLKPEDTAVYYCAVNPSLVLTTFLTVLTFLYWGQGTQVTVSS

SEQ ID NO: 38189 - protein, 122 aa, Artificial Sequence
  Chemically Synthesized
QVQLQESGGGLVQAGGSLRLSCAASGTIFVYAGMGWYRQAPGKERELVAGIGTGGTTYYADSVKGRFTISRDNAKNTVYLQMNSLKPEDTAVYYCAAPEGVAIYAHRSHRYWGQGTQVTVSS

SEQ ID NO: 38190 - protein, 125 aa, Artificial Sequence
  Chemically Synthesized
QVQLQESGGGLVQAGGSLRLSCAASGSIFLTTMGWYRQAPGKERELVAAITRGAITNYADSVKGRFTISRDNAKNTVYLQMNSLKPEDTAVYYCAVKTYATYLAATDPTYAHDYWGQGTQVTVSS

SEQ ID NO: 38191 - protein, 116 aa, Artificial Sequence
  Chemically Synthesized
QVQLQESGGGLVQAGGSLRLSCAASGNISRYFMGWYRQAPGKERELVASISYGSSTNYADSVKGRFTISRDNAKNTVYLQMNSLKPEDTAVYYCAAYDQYARYAYWGQGTQVTVSS

SEQ ID NO: 38192 - protein, 122 aa, Artificial Sequence
  Chemically Synthesized
QVQLQESGGGLVQAGGSLRLSCAASGYISGYIGMGWYRQAPGKERELVATIAYGSTTNYADSVKGRFTISRDNAKNTVYLQMNSLKPEDTAVYYCAVVYYAGGRWPFVYLYWGQGTQVTVSS

SEQ ID NO: 38193 - protein, 122 aa, Artificial Sequence
  Chemically Synthesized
QVQLQESGGGLVQAGGSLRLSCAASGYISFRSSMGWYRQAPGKERELVAGIDWGGTTYYADSVKGRFTISRDNAKNTVYLQMNSLKPEDTAVYYCAVWKYRRGSRYTYHLYWGQGTQVTVSS

SEQ ID NO: 38194 - protein, 122 aa, Artificial Sequence
  Chemically Synthesized
QVQLQESGGGLVQAGGSLRLSCAASGTISAYYQMGWYRQAPGKEREFVATITDGGSTYYADSVKGRFTISRDNAKNTVYLQMNSLKPEDTAVYYCAARDVNVGYALPYYYYWGQGTQVTVSS

SEQ ID NO: 38195 - protein, 122 aa, Artificial Sequence
  Chemically Synthesized
QVQLQESGGGLVQAGGSLRLSCAASGNIFPDAYMGWYRQAPGKERELVATISGGATTYYADSVKGRFTISRDNAKNTVYLQMNSLKPEDTAVYYCAADWIDGYDYLDAYLYWGQGTQVTVSS

SEQ ID NO: 38196 - protein, 118 aa, Artificial Sequence
  Chemically Synthesized
QVQLQESGGGLVQAGGSLRLSCAASGSISWRYRMGWYRQAPGKEREFVAGIARGGITYYADSVKGRFTISRDNAKNTVYLQMNSLKPEDTAVYYCAAHLRSNRDYTYWGQGTQVTVSS

SEQ ID NO: 38197 - protein, 118 aa, Artificial Sequence
  Chemically Synthesized
QVQLQESGGGLVQAGGSLRLSCAASGNIFQVPGMGWYRQAPGKEREFVATITAGTITNYADSVKGRFTISRDNAKNTVYLQMNSLKPEDTAVYYCAAKRWRSWGYGYWGQGTQVTVSS

SEQ ID NO: 38198 - protein, 116 aa, Artificial Sequence
  Chemically Synthesized
QVQLQESGGGLVQAGGSLRLSCAASGYISRRVFMGWYRQAPGKERELVAGIGRGGITNYADSVKGRFTISRDNAKNTVYLQMNSLKPEDTAVYYCAVRVTRVSMYWGQGTQVTVSS

SEQ ID NO: 38199 - protein, 117 aa, Artificial Sequence
  Chemically Synthesized
QVQLQESGGGLVQAGGSLRLSCAASGTISSYYMGWYRQAPGKEREFVASINYGGTTYYADSVKGRFTISRDNAKNTVYLQMNSLKPEDTAVYYCAAWWAWYLDHDYWGQGTQVTVSS

SEQ ID NO: 38200 - protein, 118 aa, Artificial Sequence
  Chemically Synthesized
QVQLQESGGGLVQAGGSLRLSCAASGSISRLSSMGWYRQAPGKEREFVAGINHGGNTYYADSVKGRFTISRDNAKNTVYLQMNSLKPEDTAVYYCAAVLRRKRRHGYWGQGTQVTVSS

SEQ ID NO: 38201 - protein, 117 aa, Artificial Sequence
  Chemically Synthesized
QVQLQESGGGLVQAGGSLRLSCAASGSIFGWRWMGWYRQAPGKERELVAAIGRGTTNYADSVKGRFTISRDNAKNTVYLQMNSLKPEDTAVYYCAADYGFIWYHRYWGQGTQVTVSS

SEQ ID NO: 38202 - protein, 124 aa, Artificial Sequence
  Chemically Synthesized
QVQLQESGGGLVQAGGSLRLSCAASGYISRQDMGWYRQAPGKERELVAAIGQGTTTNYADSVKGRFTISRDNAKNTVYLQMNSLKPEDTAVYYCAVLSTFRRFLPSVYFIFDYWGQGTQVTVSS

SEQ ID NO: 38203 - protein, 118 aa, Artificial Sequence
  Chemically Synthesized
QVQLQESGGGLVQAGGSLRLSCAASGSTSDVSYMGWYRQAPGKEREFVAGIGWGTSTYYADSVKGRFTISRDNAKNTVYLQMNSLKPEDTAVYYCAVFDARTIDHDYWGQGTQVTVSS

SEQ ID NO: 38204 - protein, 118 aa, Artificial Sequence
  Chemically Synthesized
QVQLQESGGGLVQAGGSLRLSCAASGTIFRHRWMGWYRQAPGKEREFVASINTGATTNYADSVKGRFTISRDNAKNTVYLQMNSLKPEDTAVYYCAVVIRSRAWHPYWGQGTQVTVSS

SEQ ID NO: 38205 - protein, 118 aa, Artificial Sequence
  Chemically Synthesized
QVQLQESGGGLVQAGGSLRLSCAASGNIFQLRKMGWYRQAPGKERELVATIARGAITNYADSVKGRFTISRDNAKNTVYLQMNSLKPEDTAVYYCAADRFYWGSHYYWGQGTQVTVSS

SEQ ID NO: 38206 - protein, 118 aa, Artificial Sequence
  Chemically Synthesized
QVQLQESGGGLVQAGGSLRLSCAASGYIFYYRKMGWYRQAPGKEREFVAAITYGATTNYADSVKGRFTISRDNAKNTVYLQMNSLKPEDTAVYYCAVWRRYADIHRYWGQGTQVTVSS

SEQ ID NO: 38207 - protein, 126 aa, Artificial Sequence
  Chemically Synthesized
QVQLQESGGGLVQAGGSLRLSCAASGNISAYYYMGWYRQAPGKERELVAAIAAGGITYYADSVKGRFTISRDNAKNTVYLQMNSLKPEDTAVYYCAASRQRVFFLGDDAYVPHRYWGQGTQVTVSS

SEQ ID NO: 38208 - protein, 125 aa, Artificial Sequence
  Chemically Synthesized
QVQLQESGGGLVQAGGSLRLSCAASGYISFPADMGWYRQAPGKEREFVAAIGVGGNTYYADSVKGRFTISRDNAKNTVYLQMNSLKPEDTAVYYCALLLGTTVGTVSLVTTTMYWGQGTQVTVSS

SEQ ID NO: 38209 - protein, 118 aa, Artificial Sequence
  Chemically Synthesized
QVQLQESGGGLVQAGGSLRLSCAASGSIFARFKMGWYRQAPGKERELVAAIDWGGTTYYADSVKGRFTISRDNAKNTVYLQMNSLKPEDTAVYYCAVRRYTTWSHRYWGQGTQVTVSS

SEQ ID NO: 38210 - protein, 118 aa, Artificial Sequence
  Chemically Synthesized
QVQLQESGGGLVQAGGSLRLSCAASGSISLLVYMGWYRQAPGKERELVASIGVGGSTYYADSVKGRFTISRDNAKNTVYLQMNSLKPEDTAVYYCAVADGYYYVYVYWGQGTQVTVSS

SEQ ID NO: 38211 - protein, 122 aa, Artificial Sequence
  Chemically Synthesized
QVQLQESGGGLVQAGGSLRLSCAASGNIFGTRYMGWYRQAPGKEREFVAGISYGTTTYYADSVKGRFTISRDNAKNTVYLQMNSLKPEDTAVYYCAVRGYSTYYAYRRHYYWGQGTQVTVSS

SEQ ID NO: 38212 - protein, 118 aa, Artificial Sequence
  Chemically Synthesized
QVQLQESGGGLVQAGGSLRLSCAASGSIFTGRSMGWYRQAPGKERELVATITYGGSTNYADSVKGRFTISRDNAKNTVYLQMNSLKPEDTAVYYCAVRAYVWRRLYYWGQGTQVTVSS

SEQ ID NO: 38213 - protein, 126 aa, Artificial Sequence
  Chemically Synthesized
QVQLQESGGGLVQAGGSLRLSCAASGTIFHGYVMGWYRQAPGKERELVAGIDDGSTTNYADSVKGRFTISRDNAKNTVYLQMNSLKPEDTAVYYCAVIVDDPRYVSDYSGWRLYYWGQGTQVTVSS

SEQ ID NO: 38214 - protein, 118 aa, Artificial Sequence
  Chemically Synthesized
QVQLQESGGGLVQAGGSLRLSCAASGNISEDFGMGWYRQAPGKERELVAGINEGAITYYADSVKGRFTISRDNAKNTVYLQMNSLKPEDTAVYYCAADEREIYPHLYWGQGTQVTVSS

SEQ ID NO: 38215 - protein, 126 aa, Artificial Sequence
  Chemically Synthesized
QVQLQESGGGLVQAGGSLRLSCAASGSISDTPYMGWYRQAPGKEREFVAAIGPGGNTNYADSVKGRFTISRDNAKNTVYLQMNSLKPEDTAVYYCAATQRQANDDQFYVPVRFAYWGQGTQVTVSS

SEQ ID NO: 38216 - protein, 126 aa, Artificial Sequence
  Chemically Synthesized
QVQLQESGGGLVQAGGSLRLSCAASGNISYWVVMGWYRQAPGKEREFVASIGGGGTTNYADSVKGRFTISRDNAKNTVYLQMNSLKPEDTAVYYCAADEPYYVTWGYYAYLDYAYWGQGTQVTVSS

SEQ ID NO: 38217 - protein, 118 aa, Artificial Sequence
  Chemically Synthesized
QVQLQESGGGLVQAGGSLRLSCAASGSIFGLFTMGWYRQAPGKEREFVAAIADGATTYYADSVKGRFTISRDNAKNTVYLQMNSLKPEDTAVYYCAVTWYNLSAYQYWGQGTQVTVSS

SEQ ID NO: 38218 - protein, 118 aa, Artificial Sequence
  Chemically Synthesized
QVQLQESGGGLVQAGGSLRLSCAASGTIFGFGVMGWYRQAPGKERELVAAITRGGTTNYADSVKGRFTISRDNAKNTVYLQMNSLKPEDTAVYYCAADARFYPRLSYWGQGTQVTVSS

SEQ ID NO: 38219 - protein, 122 aa, Artificial Sequence
  Chemically Synthesized
QVQLQESGGGLVQAGGSLRLSCAASGNISERHDMGWYRQAPGKEREFVAGINDGGTTYYADSVKGRFTISRDNAKNTVYLQMNSLKPEDTAVYYCAAYYNLIKSYQDRHFYWGQGTQVTVSS

SEQ ID NO: 38220 - protein, 121 aa, Artificial Sequence
  Chemically Synthesized
QVQLQESGGGLVQAGGSLRLSCAASGTIMGWYRQAPGKERELVATIDHGGNTNYADSVKGRFTISRDNAKNTVYLQMNSLKPEDTAVYYCAAIAYPKYTDEYDTLYRYGYWGQGTQVTVSS

SEQ ID NO: 38221 - protein, 118 aa, Artificial Sequence
  Chemically Synthesized
QVQLQESGGGLVQAGGSLRLSCAASGTISDQYSMGWYRQAPGKERELVASINAGATTYYADSVKGRFTISRDNAKNTVYLQMNSLKPEDTAVYYCAVGVDQTDTYRYWGQGTQVTVSS

SEQ ID NO: 38222 - protein, 118 aa, Artificial Sequence
  Chemically Synthesized
QVQLQESGGGLVQAGGSLRLSCAASGSIFETDEMGWYRQAPGKEREFVASIGYGASTYYADSVKGRFTISRDNAKNTVYLQMNSLKPEDTAVYYCAALSYWYNSLVYWGQGTQVTVSS

SEQ ID NO: 38223 - protein, 122 aa, Artificial Sequence
  Chemically Synthesized
QVQLQESGGGLVQAGGSLRLSCAASGSISWYLDMGWYRQAPGKERELVASITPGSNTYYADSVKGRFTISRDNAKNTVYLQMNSLKPEDTAVYYCAVGAGLPSPFFILFGYWGQGTQVTVSS

SEQ ID NO: 38224 - protein, 126 aa, Artificial Sequence
  Chemically Synthesized
QVQLQESGGGLVQAGGSLRLSCAASGSISPYDGMGWYRQAPGKEREFVAAIAPGGSTYYADSVKGRFTISRDNAKNTVYLQMNSLKPEDTAVYYCAVYLYDYELDPYDVNAYLYYWGQGTQVTVSS

SEQ ID NO: 38225 - protein, 117 aa, Artificial Sequence
  Chemically Synthesized
QVQLQESGGGLVQAGGSLRLSCAASGNIFYADEMGWYRQAPGKEREFVAGISGGGTTNYADSVKGRFTISRDNAKNTVYLQMNSLKPEDTAVYYCAAGPYYYDAFYWGQGTQVTVSS

SEQ ID NO: 38226 - protein, 118 aa, Artificial Sequence
  Chemically Synthesized
QVQLQESGGGLVQAGGSLRLSCAASGTIFWVLAMGWYRQAPGKEREFVAAINDGAITYYADSVKGRFTISRDNAKNTVYLQMNSLKPEDTAVYYCAAVDGGGSLHVYWGQGTQVTVSS

SEQ ID NO: 38227 - protein, 122 aa, Artificial Sequence
  Chemically Synthesized
QVQLQESGGGLVQAGGSLRLSCAASGNIFPYLFMGWYRQAPGKERELVASIAVGANTNYADSVKGRFTISRDNAKNTVYLQMNSLKPEDTAVYYCAAGEGWRRGYGYVYPYWGQGTQVTVSS

SEQ ID NO: 38228 - protein, 122 aa, Artificial Sequence
  Chemically Synthesized
QVQLQESGGGLVQAGGSLRLSCAASGNISGSYDMGWYRQAPGKEREFVATIAPGANTYYADSVKGRFTISRDNAKNTVYLQMNSLKPEDTAVYYCAVGSFSTYYSYAYHWYWGQGTQVTVSS

SEQ ID NO: 38229 - protein, 122 aa, Artificial Sequence
  Chemically Synthesized
QVQLQESGGGLVQAGGSLRLSCAASGYIFPTYRMGWYRQAPGKERELVAAIGWGTSTNYADSVKGRFTISRDNAKNTVYLQMNSLKPEDTAVYYCAVRYGGDTLTLYGLRYWGQGTQVTVSS

SEQ ID NO: 38230 - protein, 125 aa, Artificial Sequence
  Chemically Synthesized
QVQLQESGGGLVQAGGSLRLSCAASGSISQWAMGWYRQAPGKEREFVAGIADGGNTYYADSVKGRFTISRDNAKNTVYLQMNSLKPEDTAVYYCAASYPVGWRYRWRPTYEHPYWGQGTQVTVSS

SEQ ID NO: 38231 - protein, 118 aa, Artificial Sequence
  Chemically Synthesized
QVQLQESGGGLVQAGGSLRLSCAASGTISYDLAMGWYRQAPGKERELVASISGGTSTNYADSVKGRFTISRDNAKNTVYLQMNSLKPEDTAVYYCAVWPGYYASHNYWGQGTQVTVSS

SEQ ID NO: 38232 - protein, 126 aa, Artificial Sequence
  Chemically Synthesized
QVQLQESGGGLVQAGGSLRLSCAASGTISPYTDMGWYRQAPGKERELVAAINDGGITYYADSVKGRFTISRDNAKNTVYLQMNSLKPEDTAVYYCAAYPYALPYDDDGAGYTLVYWGQGTQVTVSS

SEQ ID NO: 38233 - protein, 126 aa, Artificial Sequence
  Chemically Synthesized
QVQLQESGGGLVQAGGSLRLSCAASGSISWQGYMGWYRQAPGKERELVAAIGPGGSTYYADSVKGRFTISRDNAKNTVYLQMNSLKPEDTAVYYCAARDPRWFPHYQLSRAVHDYWGQGTQVTVSS

SEQ ID NO: 38234 - protein, 118 aa, Artificial Sequence
  Chemically Synthesized
QVQLQESGGGLVQAGGSLRLSCAASGYISTWWLMGWYRQAPGKEREFVAGIAYGSNTYYADSVKGRFTISRDNAKNTVYLQMNSLKPEDTAVYYCAVHPDSGSPHDYWGQGTQVTVSS

SEQ ID NO: 38235 - protein, 117 aa, Artificial Sequence
  Chemically Synthesized
QVQLQESGGGLVQAGGSLRLSCAASGTISLLYAMGWYRQAPGKERELVASINKGTSTYYADSVKGRFTISRDNAKNTVYLQMNSLKPEDTAVYYCAAQGATYPHAYWGQGTQVTVSS

SEQ ID NO: 38236 - protein, 118 aa, Artificial Sequence
  Chemically Synthesized
QVQLQESGGGLVQAGGSLRLSCAASGNISRRSKMGWYRQAPGKERELVAGIGRGAITYYADSVKGRFTISRDNAKNTVYLQMNSLKPEDTAVYYCAVIFGGFSPFGYWGQGTQVTVSS

SEQ ID NO: 38237 - protein, 118 aa, Artificial Sequence
  Chemically Synthesized
QVQLQESGGGLVQAGGSLRLSCAASGYIFEFLSMGWYRQAPGKERELVAGISYGTSTYYADSVKGRFTISRDNAKNTVYLQMNSLKPEDTAVYYCAVDILRASYLDYWGQGTQVTVSS

SEQ ID NO: 38238 - protein, 118 aa, Artificial Sequence
  Chemically Synthesized
QVQLQESGGGLVQAGGSLRLSCAASGSISDWYIMGWYRQAPGKEREFVAAIGRGGITYYADSVKGRFTISRDNAKNTVYLQMNSLKPEDTAVYYCAAPVDGYDYLQYWGQGTQVTVSS

SEQ ID NO: 38239 - protein, 118 aa, Artificial Sequence
  Chemically Synthesized
QVQLQESGGGLVQAGGSLRLSCAASGNISGYYHMGWYRQAPGKEREFVAGIAIGSTTYYADSVKGRFTISRDNAKNTVYLQMNSLKPEDTAVYYCAVFARLDTDHDYWGQGTQVTVSS

SEQ ID NO: 38240 - protein, 121 aa, Artificial Sequence
  Chemically Synthesized
QVQLQESGGGLVQAGGSLRLSCAASGTIFRFDMGWYRQAPGKEREFVAGITDGGTTYYADSVKGRFTISRDNAKNTVYLQMNSLKPEDTAVYYCAALYVTQEIYDLIFPYWGQGTQVTVSS

SEQ ID NO: 38241 - protein, 118 aa, Artificial Sequence
  Chemically Synthesized
QVQLQESGGGLVQAGGSLRLSCAASGNIFRGYYMGWYRQAPGKEREFVAGIAYGTNTYYADSVKGRFTISRDNAKNTVYLQMNSLKPEDTAVYYCAAFYNYDAVHNYWGQGTQVTVSS

SEQ ID NO: 38242 - protein, 118 aa, Artificial Sequence
  Chemically Synthesized
QVQLQESGGGLVQAGGSLRLSCAASGSIFYPYYMGWYRQAPGKEREFVAGITAGTSTYYADSVKGRFTISRDNAKNTVYLQMNSLKPEDTAVYYCAVFHATYTDYDYWGQGTQVTVSS

SEQ ID NO: 38243 - protein, 118 aa, Artificial Sequence
  Chemically Synthesized
QVQLQESGGGLVQAGGSLRLSCAASGNISRWFDMGWYRQAPGKEREFVAGISYGGTTYYADSVKGRFTISRDNAKNTVYLQMNSLKPEDTAVYYCAVANSGFLYFDYWGQGTQVTVSS

SEQ ID NO: 38244 - protein, 124 aa, Artificial Sequence
  Chemically Synthesized
QVQLQESGGGLVQAGGSLRLSCAASGSISVIRGMGWYRQAPGKERELVATIGGGGSTYYADSVKGRFTISRDNAKNTVYLQMNSLKPEDTAVYYCAVFYYKYRYRDGPRGYRYWGQGTQVTVSS

SEQ ID NO: 38245 - protein, 118 aa, Artificial Sequence
  Chemically Synthesized
QVQLQESGGGLVQAGGSLRLSCAASGTIFYRKAMGWYRQAPGKEREFVAGIAYGGTTNYADSVKGRFTISRDNAKNTVYLQMNSLKPEDTAVYYCAVSSRLYWRYHYWGQGTQVTVSS

SEQ ID NO: 38246 - protein, 110 aa, Artificial Sequence
  Chemically Synthesized
QVQLQESGGGLVQAGGSLRLSCAASGTISPGYGMGWYRQAPGKERELVATINIGTNTYYADSVKGRFTISRDNAKNTVYLQMNSLKPEDTAVYYCALCYWGQGTQVTVSS

SEQ ID NO: 38247 - protein, 126 aa, Artificial Sequence
  Chemically Synthesized
QVQLQESGGGLVQAGGSLRLSCAASGYISIWYAMGWYRQAPGKEREFVASITRGTTTYYADSVKGRFTISRDNAKNTVYLQMNSLKPEDTAVYYCAAYLATYEYPQYDGSADFIYWGQGTQVTVSS

SEQ ID NO: 38248 - protein, 118 aa, Artificial Sequence
  Chemically Synthesized
QVQLQESGGGLVQAGGSLRLSCAASGNISSIADMGWYRQAPGKEREFVASISPGGSTYYADSVKGRFTISRDNAKNTVYLQMNSLKPEDTAVYYCAAYIWWSRPYYYWGQGTQVTVSS

SEQ ID NO: 38249 - protein, 118 aa, Artificial Sequence
  Chemically Synthesized
QVQLQESGGGLVQAGGSLRLSCAASGSIFPRYYMGWYRQAPGKEREFVATISIGGSTYYADSVKGRFTISRDNAKNTVYLQMNSLKPEDTAVYYCAAPYQYYWRHIYWGQGTQVTVSS

SEQ ID NO: 38250 - protein, 118 aa, Artificial Sequence
  Chemically Synthesized
QVQLQESGGGLVQAGGSLRLSCAASGYISYRRLMGWYRQAPGKEREFVASINQGGSTNYADSVKGRFTISRDNAKNTVYLQMNSLKPEDTAVYYCAVLYFRYRGYGYWGQGTQVTVSS

SEQ ID NO: 38251 - protein, 118 aa, Artificial Sequence
  Chemically Synthesized
QVQLQESGGGLVQAGGSLRLSCAASGSIFPFDDMGWYRQAPGKEREFVATIAHGAITYYADSVKGRFTISRDNAKNTVYLQMNSLKPEDTAVYYCAARGWELGTLPYWGQGTQVTVSS

SEQ ID NO: 38252 - protein, 125 aa, Artificial Sequence
  Chemically Synthesized
QVQLQESGGGLVQAGGSLRLSCAASGSISADSMGWYRQAPGKERELVAGITDGATTNYADSVKGRFTISRDNAKNTVYLQMNSLKPEDTAVYYCAATSVGGRANYLQDAVRFNYWGQGTQVTVSS

SEQ ID NO: 38253 - protein, 118 aa, Artificial Sequence
  Chemically Synthesized
QVQLQESGGGLVQAGGSLRLSCAASGSISDWYVMGWYRQAPGKEREFVAAIDNGTTTYYADSVKGRFTISRDNAKNTVYLQMNSLKPEDTAVYYCAVNSYAKDPYPYWGQGTQVTVSS

SEQ ID NO: 38254 - protein, 118 aa, Artificial Sequence
  Chemically Synthesized
QVQLQESGGGLVQAGGSLRLSCAASGTISGTQLMGWYRQAPGKERELVAAIANGGNTYYADSVKGRFTISRDNAKNTVYLQMNSLKPEDTAVYYCAVILYGQDLFVYWGQGTQVTVSS

SEQ ID NO: 38255 - protein, 117 aa, Artificial Sequence
  Chemically Synthesized
QVQLQESGGGLVQAGGSLRLSCAASGSIFSVRMGWYRQAPGKEREFVAGIARGTITYYADSVKGRFTISRDNAKNTVYLQMNSLKPEDTAVYYCAVPRIRRESHPYWGQGTQVTVSS

SEQ ID NO: 38256 - protein, 109 aa, Artificial Sequence
  Chemically Synthesized
QVQLQESGGGLVQAGGSLRLSCAASGSISRDDAMGWYRQAPGKERELVASIGGGANTNYADSVKGRFTISRDNAKNTVYLQMNSLKPEDTAVYYCAYYWGQGTQVTVSS

SEQ ID NO: 38257 - protein, 117 aa, Artificial Sequence
  Chemically Synthesized
QVQLQESGGGLVQAGGSLRLSCAASGTISTRSMGWYRQAPGKEREFVAAIDYGASTYYADSVKGRFTISRDNAKNTVYLQMNSLKPEDTAVYYCAAYWVKTGSLRYWGQGTQVTVSS

SEQ ID NO: 38258 - protein, 117 aa, Artificial Sequence
  Chemically Synthesized
QVQLQESGGGLVQAGGSLRLSCAASGTIRLYYMGWYRQAPGKEREFVATINYGASTNYADSVKGRFTISRDNAKNTVYLQMNSLKPEDTAVYYCAVIIYADKGYPYWGQGTQVTVSS

SEQ ID NO: 38259 - protein, 126 aa, Artificial Sequence
  Chemically Synthesized
QVQLQESGGGLVQAGGSLRLSCAASGYISGPYLMGWYRQAPGKERELVAAIAQGTITYYADSVKGRFTISRDNAKNTVYLQMNSLKPEDTAVYYCAADEYQGQLARSPWRHWHRYWGQGTQVTVSS

SEQ ID NO: 38260 - protein, 118 aa, Artificial Sequence
  Chemically Synthesized
QVQLQESGGGLVQAGGSLRLSCAASGNISVDSEMGWYRQAPGKEREFVAGIDYGGSTYYADSVKGRFTISRDNAKNTVYLQMNSLKPEDTAVYYCAVRDTYGYTFIYWGQGTQVTVSS

SEQ ID NO: 38261 - protein, 118 aa, Artificial Sequence
  Chemically Synthesized
QVQLQESGGGLVQAGGSLRLSCAASGNISAPGYMGWYRQAPGKEREFVAAITGGGITYYADSVKGRFTISRDNAKNTVYLQMNSLKPEDTAVYYCAVRFTGVYVLDYWGQGTQVTVSS

SEQ ID NO: 38262 - protein, 122 aa, Artificial Sequence
  Chemically Synthesized
QVQLQESGGGLVQAGGSLRLSCAASGNISLYGEMGWYRQAPGKERELVAAINVGTITYYADSVKGRFTISRDNAKNTVYLQMNSLKPEDTAVYYCAAGDEYFAQRVSPHDYWGQGTQVTVSS

SEQ ID NO: 38263 - protein, 118 aa, Artificial Sequence
  Chemically Synthesized
QVQLQESGGGLVQAGGSLRLSCAASGSIFYGLAMGWYRQAPGKERELVAAINGGTNTYYADSVKGRFTISRDNAKNTVYLQMNSLKPEDTAVYYCAVRTEPYKWFGYWGQGTQVTVSS

SEQ ID NO: 38264 - protein, 118 aa, Artificial Sequence
  Chemically Synthesized
QVQLQESGGGLVQAGGSLRLSCAASGTISGWHNMGWYRQAPGKERELVASIAQGTSTYYADSVKGRFTISRDNAKNTVYLQMNSLKPEDTAVYYCAVDYYYPYVHAYWGQGTQVTVSS

SEQ ID NO: 38265 - protein, 122 aa, Artificial Sequence
  Chemically Synthesized
QVQLQESGGGLVQAGGSLRLSCAASGNIFYSFPMGWYRQAPGKERELVATIALGSTTNYADSVKGRFTISRDNAKNTVYLQMNSLKPEDTAVYYCAAGYDLAATDLYSLYYWGQGTQVTVSS

SEQ ID NO: 38266 - protein, 122 aa, Artificial Sequence
  Chemically Synthesized
QVQLQESGGGLVQAGGSLRLSCAASGYISILTDMGWYRQAPGKEREFVATINRGSTTYYADSVKGRFTISRDNAKNTVYLQMNSLKPEDTAVYYCAAPTNVPIYDHSDLDYWGQGTQVTVSS

SEQ ID NO: 38267 - protein, 122 aa, Artificial Sequence
  Chemically Synthesized
QVQLQESGGGLVQAGGSLRLSCAASGTIFLYFYMGWYRQAPGKERELVAAITEGSTTYYADSVKGRFTISRDNAKNTVYLQMNSLKPEDTAVYYCAAADEATRILRAFLYYWGQGTQVTVSS

SEQ ID NO: 38268 - protein, 121 aa, Artificial Sequence
  Chemically Synthesized
QVQLQESGGGLVQAGGSLRLSCAASGNIYNYNMGWYRQAPGKERELVAGISLGSSTYYADSVKGRFTISRDNAKNTVYLQMNSLKPEDTAVYYCAAITYLWYYDREYFLYWGQGTQVTVSS

SEQ ID NO: 38269 - protein, 126 aa, Artificial Sequence
  Chemically Synthesized
QVQLQESGGGLVQAGGSLRLSCAASGTISQVVNMGWYRQAPGKERELVASIGVGGNTNYADSVKGRFTISRDNAKNTVYLQMNSLKPEDTAVYYCAVGYVQHDGFEYTYQYHHYYWGQGTQVTVSS

SEQ ID NO: 38270 - protein, 122 aa, Artificial Sequence
  Chemically Synthesized
QVQLQESGGGLVQAGGSLRLSCAASGYIFQNAVMGWYRQAPGKEREFVASIGGGGSTNYADSVKGRFTISRDNAKNTVYLQMNSLKPEDTAVYYCAVHPYYRGKRTDAHYYWGQGTQVTVSS

SEQ ID NO: 38271 - protein, 127 aa, Artificial Sequence
  Chemically Synthesized
QVQLQESGGGLVQAGGSLRLSCAASGNISTVYGMGWYRQAPGKERELVAAITHGTNTYYADSVKGRFTISRDNAKNTVYLQMNSLKPEDTAVYYCAALNLDRIAYRDGAQGALHRYWGQGTQVTVSS

SEQ ID NO: 38272 - protein, 117 aa, Artificial Sequence
  Chemically Synthesized
QVQLQESGGGLVQAGGSLRLSCAASGSIFALIYMGWYRQAPGKERELLPVLMLVLLPYADSVKGRFTISRDNAKNTVYLQMNSLKPEDTAVYYCAVLDLRYRDHAYWGQGTQVTVSS

SEQ ID NO: 38273 - protein, 116 aa, Artificial Sequence
  Chemically Synthesized
QVQLQESGGGLVQAGGSLRLSCAASGTISGTTSMGWYRQAPGKERELVATIAYGANTNYADSVKGRFTISRDNAKNTVYLQMNSLKPEDTAVYYCAASVNTVLMYWGQGTQVTVSS

SEQ ID NO: 38274 - protein, 118 aa, Artificial Sequence
  Chemically Synthesized
QVQLQESGGGLVQAGGSLRLSCAASGSISQDSLMGWYRQAPGKERELVAAIDYGANTNYADSVKGRFTISRDNAKNTVYLQMNSLKPEDTAVYYCAAWSWSGKPFVYWGQGTQVTVSS

SEQ ID NO: 38275 - protein, 115 aa, Artificial Sequence
  Chemically Synthesized
QVQLQESGGGLVQAGGSLRLSCAASGYISYPHYMGWYRQAPGKERELVASMLTVVIPYADSVKGRFTISRDNAKNTVYLQMNSLKPEDTAVYYCALTVVVCLMYWGQGTQVTVSS

SEQ ID NO: 38276 - protein, 122 aa, Artificial Sequence
  Chemically Synthesized
QVQLQESGGGLVQAGGSLRLSCAASGSISRYYGMGWYRQAPGKEREFVATIAYGTSTYYADSVKGRFTISRDNAKNTVYLQMNSLKPEDTAVYYCAADYDIADADPPSFYYWGQGTQVTVSS

SEQ ID NO: 38277 - protein, 118 aa, Artificial Sequence
  Chemically Synthesized
QVQLQESGGGLVQAGGSLRLSCAASGSIFGDPIMGWYRQAPGKERELVATIAPGGTTNYADSVKGRFTISRDNAKNTVYLQMNSLKPEDTAVYYCAAYTTSIFWFPYWGQGTQVTVSS

SEQ ID NO: 38278 - protein, 122 aa, Artificial Sequence
  Chemically Synthesized
QVQLQESGGGLVQAGGSLRLSCAASGYIFYTPGMGWYRQAPGKERELVASIGNGGNTYYADSVKGRFTISRDNAKNTVYLQMNSLKPEDTAVYYCAAYHLPANEWESDFQYWGQGTQVTVSS

SEQ ID NO: 38279 - protein, 122 aa, Artificial Sequence
  Chemically Synthesized
QVQLQESGGGLVQAGGSLRLSCAASGTISHVGYMGWYRQAPGKERELVATITWGGNTYYADSVKGRFTISRDNAKNTVYLQMNSLKPEDTAVYYCAADNGYRPSQSASFRYWGQGTQVTVSS

SEQ ID NO: 38280 - protein, 122 aa, Artificial Sequence
  Chemically Synthesized
QVQLQESGGGLVQAGGSLRLSCAASGNISHERYMGWYRQAPGKERELVATINKGAITNYADSVKGRFTISRDNAKNTVYLQMNSLKPEDTAVYYCAVSPRPSDWYDNPHWYWGQGTQVTVSS

SEQ ID NO: 38281 - protein, 126 aa, Artificial Sequence
  Chemically Synthesized
QVQLQESGGGLVQAGGSLRLSCAASGTIFGTLWMGWYRQAPGKERELVAGITGGSNTYYADSVKGRFTISRDNAKNTVYLQMNSLKPEDTAVYYCAAPEDYNTWGSPNDPLLPWYWGQGTQVTVSS

SEQ ID NO: 38282 - protein, 118 aa, Artificial Sequence
  Chemically Synthesized
QVQLQESGGGLVQAGGSLRLSCAASGNISVYYGMGWYRQAPGKERELVATISTGAITNYADSVKGRFTISRDNAKNTVYLQMNSLKPEDTAVYYCAVRYLVGQNYYYWGQGTQVTVSS

SEQ ID NO: 38283 - protein, 122 aa, Artificial Sequence
  Chemically Synthesized
QVQLQESGGGLVQAGGSLRLSCAASGTIFRAIYMGWYRQAPGKERELVAAIGYGTSTNYADSVKGRFTISRDNAKNTVYLQMNSLKPEDTAVYYCAVNYVRTYFDRRRFYYWGQGTQVTVSS

SEQ ID NO: 38284 - protein, 113 aa, Artificial Sequence
  Chemically Synthesized
QVQLQESGGGLVQAGGSLRLSCAASGYISYGRIMGWYRQAPGKERELVASISYGSITYYADSVKGRFTISRDNAKNTVYLQMNSLKPEDTAVYYCAAVGYGYWGQGTQVTVSS

SEQ ID NO: 38285 - protein, 122 aa, Artificial Sequence
  Chemically Synthesized
QVQLQESGGGLVQAGGSLRLSCAASGYIFGTLYMGWYRQAPGKERELVAGIGYGANTYYADSVKGRFTISRDNAKNTVYLQMNSLKPEDTAVYYCAARQRDTEHYDVRHSYWGQGTQVTVSS

SEQ ID NO: 38286 - protein, 122 aa, Artificial Sequence
  Chemically Synthesized
QVQLQESGGGLVQAGGSLRLSCAASGNISYIAGMGWYRQAPGKERELVAAIAGGGNTYYADSVKGRFTISRDNAKNTVYLQMNSLKPEDTAVYYCAAYTGGNVNGRDDHTYWGQGTQVTVSS

SEQ ID NO: 38287 - protein, 126 aa, Artificial Sequence
  Chemically Synthesized
QVQLQESGGGLVQAGGSLRLSCAASGNISDTFAMGWYRQAPGKEREFVATIDFGGNTNYADSVKGRFTISRDNAKNTVYLQMNSLKPEDTAVYYCAVYDSGYIGDYGFPRSYFGYWGQGTQVTVSS

SEQ ID NO: 38288 - protein, 118 aa, Artificial Sequence
  Chemically Synthesized
QVQLQESGGGLVQAGGSLRLSCAASGTIFGDQYMGWYRQAPGKERELVASISNGTSTYYADSVKGRFTISRDNAKNTVYLQMNSLKPEDTAVYYCAVDDAASQYLHYWGQGTQVTVSS

SEQ ID NO: 38289 - protein, 118 aa, Artificial Sequence
  Chemically Synthesized
QVQLQESGGGLVQAGGSLRLSCAASGTISPGYLMGWYRQAPGKEREFVASINYGTSTYYADSVKGRFTISRDNAKNTVYLQMNSLKPEDTAVYYCAVYRWDRYYLPYWGQGTQVTVSS

SEQ ID NO: 38290 - protein, 117 aa, Artificial Sequence
  Chemically Synthesized
QVQLQESGGGLVQAGGSLRLSCAASGTIFYPGAMGWYRQAPGKERELVAAISRGTITYYADSVKGRFTISRDNAKNTVYLQMNSLKPEDTAVYYCAVSLYRQPYRYWGQGTQVTVSS

SEQ ID NO: 38291 - protein, 125 aa, Artificial Sequence
  Chemically Synthesized
QVQLQESGGGLVQAGGSLRLSCAASGTISALSPMGWYRQAPGKEREFVATITYGTSTYYADSVKGRFTISRDNAKNTVYLQMNSLKPEDTAVYYCAVVDGPRPTGHISSVIHIYWGQGTQVTVSS

SEQ ID NO: 38292 - protein, 126 aa, Artificial Sequence
  Chemically Synthesized
QVQLQESGGGLVQAGGSLRLSCAASGTISQYSRMGWYRQAPGKERELVASITEGGSTYYADSVKGRFTISRDNAKNTVYLQMNSLKPEDTAVYYCAVYRTSHTDEYYYAIFDLVYWGQGTQVTVSS

SEQ ID NO: 38293 - protein, 126 aa, Artificial Sequence
  Chemically Synthesized
QVQLQESGGGLVQAGGSLRLSCAASGSISYDQRMGWYRQAPGKEREFVAGIDYGASTYYADSVKGRFTISRDNAKNTVYLQMNSLKPEDTAVYYCAVKYGIIRYDALGDTLTCMYWGQGTQVTVSS

SEQ ID NO: 38294 - protein, 120 aa, Artificial Sequence
  Chemically Synthesized
QVQLQESGGGLVQAGGSLRLSCAASGSIFGRTYGMGWYRQAPGKERELVAAIAAGGTNTYYADSVKGRFTISRDNAKNTVYLQMNSLKPEDTAVYYCAAVAVYPYPYRYWGQGTQVTVSS

SEQ ID NO: 38295 - protein, 118 aa, Artificial Sequence
  Chemically Synthesized
QVQLQESGGGLVQAGGSLRLSCAASGTIFTQRPMGWYRQAPGKERELVAAIASGGNTYYADSVKGRFTISRDNAKNTVYLQMNSLKPEDTAVYYCAAYFYWLPHHAYWGQGTQVTVSS

SEQ ID NO: 38296 - protein, 118 aa, Artificial Sequence
  Chemically Synthesized
QVQLQESGGGLVQAGGSLRLSCAASGNISYVYLMGWYRQAPGKERELVAGIDGGATTYYADSVKGRFTISRDNAKNTVYLQMNSLKPEDTAVYYCAAYSWPDDRHRYWGQGTQVTVSS

SEQ ID NO: 38297 - protein, 118 aa, Artificial Sequence
  Chemically Synthesized
QVQLQESGGGLVQAGGSLRLSCAASGYIFYKLTMGWYRQAPGKEREFVAGITSGAITYYADSVKGRFTISRDNAKNTVYLQMNSLKPEDTAVYYCAAIKYDILYLTYWGQGTQVTVSS

SEQ ID NO: 38298 - protein, 118 aa, Artificial Sequence
  Chemically Synthesized
QVQLQESGGGLVQAGGSLRLSCAASGTISDHYQMGWYRQAPGKEREFVAAITDGGSTYYADSVKGRFTISRDNAKNTVYLQMNSLKPEDTAVYYCAAGYTYATNLGYWGQGTQVTVSS

SEQ ID NO: 38299 - protein, 122 aa, Artificial Sequence
  Chemically Synthesized
QVQLQESGGGLVQAGGSLRLSCAASGTIFPYSIMGWYRQAPGKEREFVAAIALGSNTNYADSVKGRFTISRDNAKNTVYLQMNSLKPEDTAVYYCAALFQDSWVPDSFFDYWGQGTQVTVSS

SEQ ID NO: 38300 - protein, 126 aa, Artificial Sequence
  Chemically Synthesized
QVQLQESGGGLVQAGGSLRLSCAASGNIFYGYPMGWYRQAPGKERELVAAIAYGGNTNYADSVKGRFTISRDNAKNTVYLQMNSLKPEDTAVYYCAARYQIYDYHRGGTYQWYSYWGQGTQVTVSS

SEQ ID NO: 38301 - protein, 117 aa, Artificial Sequence
  Chemically Synthesized
QVQLQESGGGLVQAGGSLRLSCAASGSIFSGRMGWYRQAPGKEREFVAAIADGTSTYYADSVKGRFTISRDNAKNTVYLQMNSLKPEDTAVYYCAVQYPVSTDYRYWGQGTQVTVSS

SEQ ID NO: 38302 - protein, 117 aa, Artificial Sequence
  Chemically Synthesized
QVQLQESGGGLVQAGGSLRLSCAASGTISPVGEMGWYRQAPGKERELVATITVGANTYYADSVKGRFTISRDNAKNTVYLQMNSLKPEDTAVYYCAVPDYSTVTMYWGQGTQVTVSS

SEQ ID NO: 38303 - protein, 118 aa, Artificial Sequence
  Chemically Synthesized
QVQLQESGGGLVQAGGSLRLSCAASGNIFEQSTMGWYRQAPGKERELVATIDSGSSTNYADSVKGRFTISRDNAKNTVYLQMNSLKPEDTAVYYCAAAGYTYWPLYYWGQGTQVTVSS

SEQ ID NO: 38304 - protein, 118 aa, Artificial Sequence
  Chemically Synthesized
QVQLQESGGGLVQAGGSLRLSCAASGYIFYPEYMGWYRQAPGKEREFVATIGYGGNTNYADSVKGRFTISRDNAKNTVYLQMNSLKPEDTAVYYCAVHGYDYGAHAYWGQGTQVTVSS

SEQ ID NO: 38305 - protein, 118 aa, Artificial Sequence
  Chemically Synthesized
QVQLQESGGGLVQAGGSLRLSCAASGTISYPSSMGWYRQAPGKEREFVAGIGDGATTNYADSVKGRFTISRDNAKNTVYLQMNSLKPEDTAVYYCAVLLDTGSRYAYWGQGTQVTVSS

SEQ ID NO: 38306 - protein, 122 aa, Artificial Sequence
  Chemically Synthesized
QVQLQESGGGLVQAGGSLRLSCAASGYISAPPYMGWYRQAPGKERELVASIGGGSNTNYADSVKGRFTISRDNAKNTVYLQMNSLKPEDTAVYYCAAPWSYVDTDYDVHPYWGQGTQVTVSS

SEQ ID NO: 38307 - protein, 118 aa, Artificial Sequence
  Chemically Synthesized
QVQLQESGGGLVQAGGSLRLSCAASGTIFYTDSMGWYRQAPGKERELVATISEGANTYYADSVKGRFTISRDNAKNTVYLQMNSLKPEDTAVYYCAVTQGGFTNHAYWGQGTQVTVSS

SEQ ID NO: 38308 - protein, 122 aa, Artificial Sequence
  Chemically Synthesized
QVQLQESGGGLVQAGGSLRLSCAASGSIFDYYVMGWYRQAPGKERELVASIAWGSSTYYADSVKGRFTISRDNAKNTVYLQMNSLKPEDTAVYYCAAVLDYYDGDYKLFTYWGQGTQVTVSS

SEQ ID NO: 38309 - protein, 118 aa, Artificial Sequence
  Chemically Synthesized
QVQLQESGGGLVQAGGSLRLSCAASGSIFYADYMGWYRQAPGKERELVAGINRGSNTNYADSVKGRFTISRDNAKNTVYLQMNSLKPEDTAVYYCAVWYHARDPHGYWGQGTQVTVSS

SEQ ID NO: 38310 - protein, 118 aa, Artificial Sequence
  Chemically Synthesized
QVQLQESGGGLVQAGGSLRLSCAASGTIFYRRIMGWYRQAPGKERELVAAISYGANTYYADSVKGRFTISRDNAKNTVYLQMNSLKPEDTAVYYCAVYPDIWSYLNYWGQGTQVTVSS

SEQ ID NO: 38311 - protein, 122 aa, Artificial Sequence
  Chemically Synthesized
QVQLQESGGGLVQAGGSLRLSCAASGTISGVYTMGWYRQAPGKERELVATIDAGSTTNYADSVKGRFTISRDNAKNTVYLQMNSLKPEDTAVYYCAVGKHSPGETQDWYKYWGQGTQVTVSS

SEQ ID NO: 38312 - protein, 118 aa, Artificial Sequence
  Chemically Synthesized
QVQLQESGGGLVQAGGSLRLSCAASGNISYYRPMGWYRQAPGKERELVATIADGGNTNYADSVKGRFTISRDNAKNTVYLQMNSLKPEDTAVYYCAATDLSSDLLQYWGQGTQVTVSS

SEQ ID NO: 38313 - protein, 121 aa, Artificial Sequence
  Chemically Synthesized
QVQLQESGGGLVQAGGSLRLSCAASGYIFYHGYMGWYRQAPGKEREFVAAIGTGGTTNYADSVKGRFTISRDNAKNTVYLQMNSLKPEDTAVYYCAAWYSLTNRTFSSIYWGQGTQVTVSS

SEQ ID NO: 38314 - protein, 118 aa, Artificial Sequence
  Chemically Synthesized
QVQLQESGGGLVQAGGSLRLSCAASGTISPPYIMGWYRQAPGKERELVAGIGLGGTTYYADSVKGRFTISRDNAKNTVYLQMNSLKPEDTAVYYCAALYRGGWYFDYWGQGTQVTVSS

SEQ ID NO: 38315 - protein, 125 aa, Artificial Sequence
  Chemically Synthesized
QVQLQESGGGLVQAGGSLRLSCAASGYFLTTGMGWYRQAPGKERELVAGISVGGTTNYADSVKGRFTISRDNAKNTVYLQMNSLKPEDTAVYYCAATYLQIYGYPYEDDPGYTYWGQGTQVTVSS

SEQ ID NO: 38316 - protein, 122 aa, Artificial Sequence
  Chemically Synthesized
QVQLQESGGGLVQAGGSLRLSCAASGSISSDSFMGWYRQAPGKEREFVAAITGGATTYYADSVKGRFTISRDNAKNTVYLQMNSLKPEDTAVYYCAAWYSYDAFVQYDLDYWGQGTQVTVSS

SEQ ID NO: 38317 - protein, 118 aa, Artificial Sequence
  Chemically Synthesized
QVQLQESGGGLVQAGGSLRLSCAASGTIFTGFDMGWYRQAPGKEREFVAAISQGTNTNYADSVKGRFTISRDNAKNTVYLQMNSLKPEDTAVYYCAAIYTPYLLLSYWGQGTQVTVSS

SEQ ID NO: 38318 - protein, 122 aa, Artificial Sequence
  Chemically Synthesized
QVQLQESGGGLVQAGGSLRLSCAASGYIFDEQFMGWYRQAPGKERELVAGITRGTTTYYADSVKGRFTISRDNAKNTVYLQMNSLKPEDTAVYYCAARRNYSSGSGEWLDYWGQGTQVTVSS

SEQ ID NO: 38319 - protein, 117 aa, Artificial Sequence
  Chemically Synthesized
QVQLQESGGGLVQAGGSLRLSCAASGSICMGWYRQAPGKERELVAAIAWGSNTNYADSVKGRFTISRDNAKNTVYLQMNSLKPEDTAVYYCAAYYYYETQYAHSIYWGQGTQVTVSS

SEQ ID NO: 38320 - protein, 118 aa, Artificial Sequence
  Chemically Synthesized
QVQLQESGGGLVQAGGSLRLSCAASGNISVVEYMGWYRQAPGKERELVAGIATGSTTNYADSVKGRFTISRDNAKNTVYLQMNSLKPEDTAVYYCAVYPRLYYYYPYWGQGTQVTVSS

SEQ ID NO: 38321 - protein, 126 aa, Artificial Sequence
  Chemically Synthesized
QVQLQESGGGLVQAGGSLRLSCAASGYISGTPFMGWYRQAPGKEREFVAGISLGGITYYADSVKGRFTISRDNAKNTVYLQMNSLKPEDTAVYYCAAGEYYGRPYLLYPYWYYWYWGQGTQVTVSS

SEQ ID NO: 38322 - protein, 118 aa, Artificial Sequence
  Chemically Synthesized
QVQLQESGGGLVQAGGSLRLSCAASGNISWGDYMGWYRQAPGKEREFVAAIAGGGTTNYADSVKGRFTISRDNAKNTVYLQMNSLKPEDTAVYYCAALRNRGGLFWYWGQGTQVTVSS

SEQ ID NO: 38323 - protein, 118 aa, Artificial Sequence
  Chemically Synthesized
QVQLQESGGGLVQAGGSLRLSCAASGNIFVTSVMGWYRQAPGKEREFVASIALGAITNYADSVKGRFTISRDNAKNTVYLQMNSLKPEDTAVYYCAARYVSYYRYVYWGQGTQVTVSS

SEQ ID NO: 38324 - protein, 122 aa, Artificial Sequence
  Chemically Synthesized
QVQLQESGGGLVQAGGSLRLSCAASGNISRGWDMGWYRQAPGKERELVATIGRGANTYYADSVKGRFTISRDNAKNTVYLQMNSLKPEDTAVYYCAVYTYYDPLDHPYYQYWGQGTQVTVSS

SEQ ID NO: 38325 - protein, 118 aa, Artificial Sequence
  Chemically Synthesized
QVQLQESGGGLVQAGGSLRLSCAASGSISVYRYMGWYRQAPGKERELVAGIGRGGITNYADSVKGRFTISRDNAKNTVYLQMNSLKPEDTAVYYCAAYVDNPAYHSYWGQGTQVTVSS

SEQ ID NO: 38326 - protein, 122 aa, Artificial Sequence
  Chemically Synthesized
QVQLQESGGGLVQAGGSLRLSCAASGTIFYDHSMGWYRQAPGKERELVASISDGTSTNYADSVKGRFTISRDNAKNTVYLQMNSLKPEDTAVYYCAAPGPGRPRRYYYHRYWGQGTQVTVSS

SEQ ID NO: 38327 - protein, 126 aa, Artificial Sequence
  Chemically Synthesized
QVQLQESGGGLVQAGGSLRLSCAASGTISPDIYMGWYRQAPGKEREFVATISSGTSTYYADSVKGRFTISRDNAKNTVYLQMNSLKPEDTAVYYCAVTPDFDRDFGNEDDDRHWYWGQGTQVTVSS

SEQ ID NO: 38328 - protein, 122 aa, Artificial Sequence
  Chemically Synthesized
QVQLQESGGGLVQAGGSLRLSCAASGSISFTAVMGWYRQAPGKERELVAAIATGGSTYYADSVKGRFTISRDNAKNTVYLQMNSLKPEDTAVYYCAVLHHQYYDYYYGHPYWGQGTQVTVSS

SEQ ID NO: 38329 - protein, 117 aa, Artificial Sequence
  Chemically Synthesized
QVQLQESGGGLVQAGGSLRLSCAASGTISVDTYMGWYRQAPGKEREFVATIASGASTNYADSVKGRFTISRDNAKNTVYLQMNSLKPEDTAVYYCAVYYQSDSCFYWGQGTQVTVSS

SEQ ID NO: 38330 - protein, 122 aa, Artificial Sequence
  Chemically Synthesized
QVQLQESGGGLVQAGGSLRLSCAASGSIFWVYDMGWYRQAPGKEREFVASIASGSNTYYADSVKGRFTISRDNAKNTVYLQMNSLKPEDTAVYYCAVYSDEWNQTGLGFYYWGQGTQVTVSS

SEQ ID NO: 38331 - protein, 111 aa, Artificial Sequence
  Chemically Synthesized
QVQLQESGGGLVQAGGSLRLSCAASGTISGAQGMGWYRQAPGKERELVATIAAGANTYYADSVKGRFTISRDNAKNTVYLQMNSLKPEDTAVYYCAFHAYWGQGTQVTVSS

SEQ ID NO: 38332 - protein, 122 aa, Artificial Sequence
  Chemically Synthesized
QVQLQESGGGLVQAGGSLRLSCAASGTISRRKVMGWYRQAPGKERELVATIAVGTSTYYADSVKGRFTISRDNAKNTVYLQMNSLKPEDTAVYYCAVYRGYDQYRYTSHFYWGQGTQVTVSS

SEQ ID NO: 38333 - protein, 118 aa, Artificial Sequence
  Chemically Synthesized
QVQLQESGGGLVQAGGSLRLSCAASGYISQPHLMGWYRQAPGKEREFVAAISRGGNTYYADSVKGRFTISRDNAKNTVYLQMNSLKPEDTAVYYCAVYYYRWSKFGYWGQGTQVTVSS

SEQ ID NO: 38334 - protein, 121 aa, Artificial Sequence
  Chemically Synthesized
QVQLQESGGGLVQAGGSLRLSCAASGSIFTFYGMGWYRQAPGKEREFVAAIGQGAITNYADSVKGRFTISRDNAKNTVYLQMNSLKPEDTAVYYCAVYFPYTANYYPHDYWGQGTQVTVSS

SEQ ID NO: 38335 - protein, 109 aa, Artificial Sequence
  Chemically Synthesized
QVQLQESGGGLVQAGGSLRLSCAASGYIFSFRMGWYRQAPGKEREFVAAIALGGTTNYADSVKGRFTISRDNAKNTVYLQMNSLKPEDTAVYYCAYHYWGQGTQVTVSS

SEQ ID NO: 38336 - protein, 122 aa, Artificial Sequence
  Chemically Synthesized
QVQLQESGGGLVQAGGSLRLSCAASGNISTYWSMGWYRQAPGKEREFVAAISHGGTTNYADSVKGRFTISRDNAKNTVYLQMNSLKPEDTAVYYCAVWLAGDYSDSASHYYWGQGTQVTVSS

SEQ ID NO: 38337 - protein, 122 aa, Artificial Sequence
  Chemically Synthesized
QVQLQESGGGLVQAGGSLRLSCAASGNIFYTPVMGWYRQAPGKERELVAGISYGASTYYADSVKGRFTISRDNAKNTVYLQMNSLKPEDTAVYYCAARGYQGPSKQARHYYWGQGTQVTVSS

SEQ ID NO: 38338 - protein, 125 aa, Artificial Sequence
  Chemically Synthesized
QVQLQESGGGLVQAGGSLRLSCAASGTISGPYGMGWYRQAPGKEREFVAGIASGATTNYADSVKGRFTISRDNAKNTVYLQMNSLKPEDTAVYYCAVYGVVLAVVDEGGDPTFYWGQGTQVTVSS

SEQ ID NO: 38339 - protein, 115 aa, Artificial Sequence
  Chemically Synthesized
QVQLQESGGGLVQAGGSLRLSCAASGTIFITYDMGWYRQAPGKERELVAAIGAGGNTNYADSVKGRFTISRDNAKNTVYLQMNSLKPEDTAVYYCAVGGVPHTYWGQGTQVTVSS

SEQ ID NO: 38340 - protein, 118 aa, Artificial Sequence
  Chemically Synthesized
QVQLQESGGGLVQAGGSLRLSCAASGYISPLRVMGWYRQAPGKERELVASIDLGSNTNYADSVKGRFTISRDNAKNTVYLQMNSLKPEDTAVYYCAAYYPSDTYLLYWGQGTQVTVSS

SEQ ID NO: 38341 - protein, 122 aa, Artificial Sequence
  Chemically Synthesized
QVQLQESGGGLVQAGGSLRLSCAASGTISYGRYMGWYRQAPGKEREFVATIAIGSTTYYADSVKGRFTISRDNAKNTVYLQMNSLKPEDTAVYYCAARDDPRINVIEYFRYWGQGTQVTVSS

SEQ ID NO: 38342 - protein, 117 aa, Artificial Sequence
  Chemically Synthesized
QVQLQESGGGLVQAGGSLRLSCAASGYISDIIYMGWYRQAPGKERELVAAIDPGSTTNYADSVKGRFTISRDNAKNTVYLQMNSLKPEDTAVYYCAVFNLRPYYWYWGQGTQVTVSS

SEQ ID NO: 38343 - protein, 123 aa, Artificial Sequence
  Chemically Synthesized
QVQLQESGGGLVQAGGSLRLSCAASGTISYTVGMGWYRQAPGKERELVAGIDAGGNTYYADSVKGRFTISRDNAKNTVYLQMNSLKPEDTAVYYCAAYTPDHHDTPYDDHGYWGQGTQVTVSS

SEQ ID NO: 38344 - protein, 122 aa, Artificial Sequence
  Chemically Synthesized
QVQLQESGGGLVQAGGSLRLSCAASGSISDEYYMGWYRQAPGKEREFVASISYGGNTYYADSVKGRFTISRDNAKNTVYLQMNSLKPEDTAVYYCAVHYVYAPDDGDVHSYWGQGTQVTVSS

SEQ ID NO: 38345 - protein, 122 aa, Artificial Sequence
  Chemically Synthesized
QVQLQESGGGLVQAGGSLRLSCAASGNISLDATMGWYRQAPGKEREFVAAITVGASTNYADSVKGRFTISRDNAKNTVYLQMNSLKPEDTAVYYCAAPRWSGKSYPFTHWYWGQGTQVTVSS

SEQ ID NO: 38346 - protein, 118 aa, Artificial Sequence
  Chemically Synthesized
QVQLQESGGGLVQAGGSLRLSCAASGTISSNSDMGWYRQAPGKERELVAAITWGGNTNYADSVKGRFTISRDNAKNTVYLQMNSLKPEDTAVYYCAVRYPGHDAYPYWGQGTQVTVSS

SEQ ID NO: 38347 - protein, 117 aa, Artificial Sequence
  Chemically Synthesized
QVQLQESGGGLVQAGGSLRLSCAASGYISGDYFMGWYRQAPGKERELVASIAVGVVPYADSVKGRFTISRDNAKNTVYLQMNSLKPEDTAVYYCAAYLLYEDDYVYWGQGTQVTVSS

SEQ ID NO: 38348 - protein, 118 aa, Artificial Sequence
  Chemically Synthesized
QVQLQESGGGLVQAGGSLRLSCAASGTISDTSSMGWYRQAPGKERELVATIAKGANTYYADSVKGRFTISRDNAKNTVYLQMNSLKPEDTAVYYCAAYRNVHAQLFYWGQGTQVTVSS

SEQ ID NO: 38349 - protein, 113 aa, Artificial Sequence
  Chemically Synthesized
QVQLQESGGGLVQAGGSLRLSCAASGNIFAYGIMGWYRQAPGKERELVAGIGYGGITNYADSVKGRFTISRDNAKNTVYLQMNSLKPEDTAVYYCAYKHHDYWGQGTQVTVSS

SEQ ID NO: 38350 - protein, 122 aa, Artificial Sequence
  Chemically Synthesized
QVQLQESGGGLVQAGGSLRLSCAASGTISDNYFMGWYRQAPGKERELVAAITDGTNTYYADSVKGRFTISRDNAKNTVYLQMNSLKPEDTAVYYCAVIVNVLDTERIIFRYWGQGTQVTVSS

SEQ ID NO: 38351 - protein, 115 aa, Artificial Sequence
  Chemically Synthesized
QVQLQESGGGLVQAGGSLRLSCAASGSIFYYYYMGWYRQAPGKERELVASISYGTSTYYADSVKGRFTISRDNAKNTVYLQMNSLKPEDTAVYYCAVPQDGHVYWGQGTQVTVSS

SEQ ID NO: 38352 - protein, 112 aa, Artificial Sequence
  Chemically Synthesized
QVQLQESGGGLVQAGGSLRLSCAASGSISPDYGMGWYRQAPGKEREFVAAITYGSSTNYADSVKGRFTISRDNAKNTVYLQMNSLKPEDTAVYYCAAISIYWGQGTQVTVSS

SEQ ID NO: 38353 - protein, 128 aa, Artificial Sequence
  Chemically Synthesized
QVQLQESGGGLVQAGGSLRLSCAASGYISFLFTMGWYRQAPGKEREFVASITDGTITYYADSVKGRFTISRDNAKNTVYLQMNSLKPEDTAVYYCAAWLPSQEADPYTVYGLNVHEYWGQGTQVTVSS

SEQ ID NO: 38354 - protein, 113 aa, Artificial Sequence
  Chemically Synthesized
QVQLQESGGGLVQAGGSLRLSCAASGTIFAQDDMGWYRQAPGKERELVASIAGGSNTNYADSVKGRFTISRDNAKNTVYLQMNSLKPEDTAVYYCAVYGFSYWGQGTQVTVSS

SEQ ID NO: 38355 - protein, 110 aa, Artificial Sequence
  Chemically Synthesized
QVQLQESGGGLVQAGGSLRLSCAASGNIFAYIYMGWYRQAPGKEREFVASIASVLVPYADSVKGRFTISRDNAKNTVYLQMNSLKPEDTAVYYCAVVMYWGQGTQVTVSS

SEQ ID NO: 38356 - protein, 122 aa, Artificial Sequence
  Chemically Synthesized
QVQLQESGGGLVQAGGSLRLSCAASGTISKKYYMGWYRQAPGKERELVAAITSGTSTYYADSVKGRFTISRDNAKNTVYLQMNSLKPEDTAVYYCAVLYNLWAVDTKALDYWGQGTQVTVSS

SEQ ID NO: 38357 - protein, 114 aa, Artificial Sequence
  Chemically Synthesized
QVQLQESGGGLVQAGGSLRLSCAASGYIFGWDIMGWYRQAPGKEREFVAGIGWGSSTYYADSVKGRFTISRDNAKNTVYLQMNSLKPEDTAVYYCAVYAYHYYWGQGTQVTVSS

SEQ ID NO: 38358 - protein, 111 aa, Artificial Sequence
  Chemically Synthesized
QVQLQESGGGLVQAGGSLRLSCAASGYIFGYLSMGWYRQAPGKEREFVAGINDGTNTNYADSVKGRFTISRDNAKNTVYLQMNSLKPEDTAVYYCAVFCYWGQGTQVTVSS

SEQ ID NO: 38359 - protein, 118 aa, Artificial Sequence
  Chemically Synthesized
QVQLQESGGGLVQAGGSLRLSCAASGSISTYVVMGWYRQAPGKERELVASITDGGNTNYADSVKGRFTISRDNAKNTVYLQMNSLKPEDTAVYYCAAPRNTVIVLDYWGQGTQVTVSS

SEQ ID NO: 38360 - protein, 118 aa, Artificial Sequence
  Chemically Synthesized
QVQLQESGGGLVQAGGSLRLSCAASGTISLQYPMGWYRQAPGKERELVAGITPGATTNYADSVKGRFTISRDNAKNTVYLQMNSLKPEDTAVYYCAAYYTYDVYLDYWGQGTQVTVSS

SEQ ID NO: 38361 - protein, 118 aa, Artificial Sequence
  Chemically Synthesized
QVQLQESGGGLVQAGGSLRLSCAASGNIFEYGYMGWYRQAPGKEREFVATIDSGATTNYADSVKGRFTISRDNAKNTVYLQMNSLKPEDTAVYYCAVIQLSQLSYNYWGQGTQVTVSS

SEQ ID NO: 38362 - protein, 126 aa, Artificial Sequence
  Chemically Synthesized
QVQLQESGGGLVQAGGSLRLSCAASGYISRREYMGWYRQAPGKEREFVAAIGIGGNTYYADSVKGRFTISRDNAKNTVYLQMNSLKPEDTAVYYCAVGSRTNWQGDATRRYDHRYWGQGTQVTVSS

SEQ ID NO: 38363 - protein, 122 aa, Artificial Sequence
  Chemically Synthesized
QVQLQESGGGLVQAGGSLRLSCAASGYISRTHYMGWYRQAPGKEREFVAAIAYGANTYYADSVKGRFTISRDNAKNTVYLQMNSLKPEDTAVYYCAVWRSRYYTVTPRHWYWGQGTQVTVSS

SEQ ID NO: 38364 - protein, 121 aa, Artificial Sequence
  Chemically Synthesized
QVQLQESGGGLVQAGGSLRLSCAASGNIFRVSSMGWYRQAPGKEREFVAAIALGGSTNYADSVKGRFTISRDNAKNTVYLQMNSLKPEDTAVYYCAATVGSTRTLSKNIYWGQGTQVTVSS

SEQ ID NO: 38365 - protein, 118 aa, Artificial Sequence
  Chemically Synthesized
QVQLQESGGGLVQAGGSLRLSCAASGNISPGSVMGWYRQAPGKEREFVASIGYGSSTYYADSVKGRFTISRDNAKNTVYLQMNSLKPEDTAVYYCAAITFPKVGLDYWGQGTQVTVSS

SEQ ID NO: 38366 - protein, 118 aa, Artificial Sequence
  Chemically Synthesized
QVQLQESGGGLVQAGGSLRLSCAASGNIFPGKYMGWYRQAPGKEREFVAAIGYGSSTNYADSVKGRFTISRDNAKNTVYLQMNSLKPEDTAVYYCAVSVGRYRWLTYWGQGTQVTVSS

SEQ ID NO: 38367 - protein, 122 aa, Artificial Sequence
  Chemically Synthesized
QVQLQESGGGLVQAGGSLRLSCAASGSISYRNHMGWYRQAPGKEREFVAGIDAGGNTYYADSVKGRFTISRDNAKNTVYLQMNSLKPEDTAVYYCAAHRRRRPYYAQTHAYWGQGTQVTVSS

SEQ ID NO: 38368 - protein, 118 aa, Artificial Sequence
  Chemically Synthesized
QVQLQESGGGLVQAGGSLRLSCAASGTISYRFNMGWYRQAPGKEREFVAAIDYGGTTNYADSVKGRFTISRDNAKNTVYLQMNSLKPEDTAVYYCAAYSSSVSAFYYWGQGTQVTVSS

SEQ ID NO: 38369 - protein, 118 aa, Artificial Sequence
  Chemically Synthesized
QVQLQESGGGLVQAGGSLRLSCAASGTISPSYIMGWYRQAPGKEREFVAGISDGSNTNYADSVKGRFTISRDNAKNTVYLQMNSLKPEDTAVYYCAVLYVIGVALGYWGQGTQVTVSS

SEQ ID NO: 38370 - protein, 118 aa, Artificial Sequence
  Chemically Synthesized
QVQLQESGGGLVQAGGSLRLSCAASGYISPYPNMGWYRQAPGKEREFVAGIGYGGTTYYADSVKGRFTISRDNAKNTVYLQMNSLKPEDTAVYYCAVSNFGRYWHRYWGQGTQVTVSS

SEQ ID NO: 38371 - protein, 118 aa, Artificial Sequence
  Chemically Synthesized
QVQLQESGGGLVQAGGSLRLSCAASGTISARYSMGWYRQAPGKEREFVASIDEGTYYQYADSVKGRFTISRDNAKNTVYLQMNSLKPEDTAVYYCAVNNREEVPYPYWGQGTQVTVSS

SEQ ID NO: 38372 - protein, 125 aa, Artificial Sequence
  Chemically Synthesized
QVQLQESGGGLVQAGGSLRLSCAASGNIFRLDFMGWYRQAPGKEREFVATITTGSITNYADSVKGRFTISRDNAKNTVYLQMNSLKPEDTAVYYCAVPSPPYGKLFGILTSTIYWGQGTQVTVSS

SEQ ID NO: 38373 - protein, 125 aa, Artificial Sequence
  Chemically Synthesized
QVQLQESGGGLVQAGGSLRLSCAASGNISPILPMGWYRQAPGKERELVAAINDGALPYADSVKGRFTISRDNAKNTVYLQMNSLKPEDTAVYYCAAPDFISTWYAPQSGGDLAYWGQGTQVTVSS

SEQ ID NO: 38374 - protein, 126 aa, Artificial Sequence
  Chemically Synthesized
QVQLQESGGGLVQAGGSLRLSCAASGSISERSIMGWYRQAPGKERELVAAITGGGSTYYADSVKGRFTISRDNAKNTVYLQMNSLKPEDTAVYYCAVVRKRPHRNDYHYIRKYYYWGQGTQVTVSS

SEQ ID NO: 38375 - protein, 118 aa, Artificial Sequence
  Chemically Synthesized
QVQLQESGGGLVQAGGSLRLSCAASGTISPPNDMGWYRQAPGKERELVAGIGGGGSTNYADSVKGRFTISRDNAKNTVYLQMNSLKPEDTAVYYCAVTYLDDTGYPYWGQGTQVTVSS

SEQ ID NO: 38376 - protein, 122 aa, Artificial Sequence
  Chemically Synthesized
QVQLQESGGGLVQAGGSLRLSCAASGNISDLSRMGWYRQAPGKEREFVAGIAGGTTTYYADSVKGRFTISRDNAKNTVYLQMNSLKPEDTAVYYCAAILLYVKYDPDGHWYWGQGTQVTVSS

SEQ ID NO: 38377 - protein, 120 aa, Artificial Sequence
  Chemically Synthesized
QVQLQESGGGLVQAGGSLRLSCAASGTISEWPSMGWYRQAPGKERELVAAISVGTSTYYADSVKGRFTISRDNAKNTVYLQMNSLKPEDTAVYYCAVDTDVFYTDVYGYWGQGTQVTVSS

SEQ ID NO: 38378 - protein, 118 aa, Artificial Sequence
  Chemically Synthesized
QVQLQESGGGLVQAGGSLRLSCAASGNIFQYTHMGWYRQAPGKERELVASIDWGANTYYADSVKGRFTISRDNAKNTVYLQMNSLKPEDTAVYYCAAPLEQSDYFAYWGQGTQVTVSS

SEQ ID NO: 38379 - protein, 121 aa, Artificial Sequence
  Chemically Synthesized
QVQLQESGGGLVQAGGSLRLSCAASGSISSGTMGWYRQAPGKERELVATIAGGATTNYADSVKGRFTISRDNAKNTVYLQMNSLKPEDTAVYYCAVDWDAHTGTGYYYVYWGQGTQVTVSS

SEQ ID NO: 38380 - protein, 125 aa, Artificial Sequence
  Chemically Synthesized
QVQLQESGGGLVQAGGSLRLSCAASGTIFYYHGMGWYRQAPGKEREFVAAISHGATTYYADSVKGRFTISRDNAKNTVYLQMNSLKPEDTAVYYCAVSGGVDEYYVGFYYRTLYWGQGTQVTVSS

SEQ ID NO: 38381 - protein, 126 aa, Artificial Sequence
  Chemically Synthesized
QVQLQESGGGLVQAGGSLRLSCAASGYISGEWFMGWYRQAPGKERELVAGISRGSTTYYADSVKGRFTISRDNAKNTVYLQMNSLKPEDTAVYYCAVYLTHKGYDGADGVVHHRYWGQGTQVTVSS

SEQ ID NO: 38382 - protein, 126 aa, Artificial Sequence
  Chemically Synthesized
QVQLQESGGGLVQAGGSLRLSCAASGSISVDRSMGWYRQAPGKEREFVAGIGGGAITNYADSVKGRFTISRDNAKNTVYLQMNSLKPEDTAVYYCAVILEWLDRGISEDRQLYGYWGQGTQVTVSS

SEQ ID NO: 38383 - protein, 126 aa, Artificial Sequence
  Chemically Synthesized
QVQLQESGGGLVQAGGSLRLSCAASGTISRVLFMGWYRQAPGKERELVAGIATGTNTYYADSVKGRFTISRDNAKNTVYLQMNSLKPEDTAVYYCAAYVIGGGANSAWAGYPYDYWGQGTQVTVSS

SEQ ID NO: 38384 - protein, 125 aa, Artificial Sequence
  Chemically Synthesized
QVQLQESGGGLVQAGGSLRLSCAASGNIFDYANMGWYRQAPGKERELVAGIGYGTNTNYADSVKGRFTISRDNAKNTVYLQMNSLKPEDTAVYYCAAYREYRGDTVARSLLFMYWGQGTQVTVSS

SEQ ID NO: 38385 - protein, 117 aa, Artificial Sequence
  Chemically Synthesized
QVQLQESGGGLVQAGGSLRLSCAASGSIFDLRGMGWYRQAPGKEREFVATINYGASTYYADSVKGRFTISRDNAKNTVYLQMNSLKPEDTAVYYCAAGAEYDALLYWGQGTQVTVSS

SEQ ID NO: 38386 - protein, 118 aa, Artificial Sequence
  Chemically Synthesized
QVQLQESGGGLVQAGGSLRLSCAASGTIFRPYSMGWYRQAPGKERELVAAINYGGITNYADSVKGRFTISRDNAKNTVYLQMNSLKPEDTAVYYCAVYSYTRRRHPYWGQGTQVTVSS

SEQ ID NO: 38387 - protein, 121 aa, Artificial Sequence
  Chemically Synthesized
QVQLQESGGGLVQAGGSLRLSCAASGSISGVTMGWYRQAPGKERELVAGIDKGGITNYADSVKGRFTISRDNAKNTVYLQMNSLKPEDTAVYYCAVELQLDDTFVWYLFYWGQGTQVTVSS

SEQ ID NO: 38388 - protein, 118 aa, Artificial Sequence
  Chemically Synthesized
QVQLQESGGGLVQAGGSLRLSCAASGTISTYNYMGWYRQAPGKERELVAGISYGATTYYADSVKGRFTISRDNAKNTVYLQMNSLKPEDTAVYYCAATDYPYIDHPYWGQGTQVTVSS

SEQ ID NO: 38389 - protein, 122 aa, Artificial Sequence
  Chemically Synthesized
QVQLQESGGGLVQAGGSLRLSCAASGTISYSGYMGWYRQAPGKERELVATISYGTSTNYADSVKGRFTISRDNAKNTVYLQMNSLKPEDTAVYYCAVGNGEWWYYLDYFDYWGQGTQVTVSS

SEQ ID NO: 38390 - protein, 122 aa, Artificial Sequence
  Chemically Synthesized
QVQLQESGGGLVQAGGSLRLSCAASGTIFDSQVMGWYRQAPGKEREFVATITTGGNTNYADSVKGRFTISRDNAKNTVYLQMNSLKPEDTAVYYCAAGSGGVRDVTRQHSYWGQGTQVTVSS

SEQ ID NO: 38391 - protein, 126 aa, Artificial Sequence
  Chemically Synthesized
QVQLQESGGGLVQAGGSLRLSCAASGSIFRGDTMGWYRQAPGKERELVAAISTGGSTYYADSVKGRFTISRDNAKNTVYLQMNSLKPEDTAVYYCAVKRYYGNAYSSANVYIHYYWGQGTQVTVSS

SEQ ID NO: 38392 - protein, 118 aa, Artificial Sequence
  Chemically Synthesized
QVQLQESGGGLVQAGGSLRLSCAASGNISAIYPMGWYRQAPGKERELVASIADGANTYYADSVKGRFTISRDNAKNTVYLQMNSLKPEDTAVYYCAANLDKYTYHFYWGQGTQVTVSS

SEQ ID NO: 38393 - protein, 118 aa, Artificial Sequence
  Chemically Synthesized
QVQLQESGGGLVQAGGSLRLSCAASGTIFTLYLMGWYRQAPGKEREFVATISSGASTYYADSVKGRFTISRDNAKNTVYLQMNSLKPEDTAVYYCAAYSRTYNILWYWGQGTQVTVSS

SEQ ID NO: 38394 - protein, 118 aa, Artificial Sequence
  Chemically Synthesized
QVQLQESGGGLVQAGGSLRLSCAASGYISSYTVMGWYRQAPGKEREFVAAIGYGSTTNYADSVKGRFTISRDNAKNTVYLQMNSLKPEDTAVYYCAATYKYVIPYSYWGQGTQVTVSS

SEQ ID NO: 38395 - protein, 118 aa, Artificial Sequence
  Chemically Synthesized
QVQLQESGGGLVQAGGSLRLSCAASGYIFDSPSMGWYRQAPGKERELVAGIAPGSNTYYADSVKGRFTISRDNAKNTVYLQMNSLKPEDTAVYYCAVLSADPERHWYWGQGTQVTVSS

SEQ ID NO: 38396 - protein, 122 aa, Artificial Sequence
  Chemically Synthesized
QVQLQESGGGLVQAGGSLRLSCAASGNISNRIDMGWYRQAPGKEREFVAGITAGATTYYADSVKGRFTISRDNAKNTVYLQMNSLKPEDTAVYYCAVWSYVEGTAITFHPYWGQGTQVTVSS

SEQ ID NO: 38397 - protein, 121 aa, Artificial Sequence
  Chemically Synthesized
QVQLQESGGGLVQAGGSLRLSCAASGNISTSLMGWYRQAPGKERELVASINVGGNTYYADSVKGRFTISRDNAKNTVYLQMNSLKPEDTAVYYCAVWYAGVDDEASLFGYWGQGTQVTVSS

SEQ ID NO: 38398 - protein, 122 aa, Artificial Sequence
  Chemically Synthesized
QVQLQESGGGLVQAGGSLRLSCAASGTISRWGRMGWYRQAPGKEREFVASIAYGTNTNYADSVKGRFTISRDNAKNTVYLQMNSLKPEDTAVYYCAAGYWRSSYTGRRHSYWGQGTQVTVSS

SEQ ID NO: 38399 - protein, 116 aa, Artificial Sequence
  Chemically Synthesized
QVQLQESGGGLVQAGGSLRLSCAASGNIFSHYLMGWYRQAPGKEREFVAAIDQGSNTNYADSVKGRFTISRDNAKNTVYLQMNSLKPEDTAVYYCAVPSYRSHAYWGQGTQVTVSS

SEQ ID NO: 38400 - protein, 118 aa, Artificial Sequence
  Chemically Synthesized
QVQLQESGGGLVQAGGSLRLSCAASGYIFITYFMGWYRQAPGKERELVAAITQGTNTYYADSVKGRFTISRDNAKNTVYLQMNSLKPEDTAVYYCAVYDYSDLLYEYWGQGTQVTVSS

SEQ ID NO: 38401 - protein, 118 aa, Artificial Sequence
  Chemically Synthesized
QVQLQESGGGLVQAGGSLRLSCAASGNIFTYDDMGWYRQAPGKERELVATIARGGTTNYADSVKGRFTISRDNAKNTVYLQMNSLKPEDTAVYYCAVGPTNSYYLDYWGQGTQVTVSS

SEQ ID NO: 38402 - protein, 122 aa, Artificial Sequence
  Chemically Synthesized
QVQLQESGGGLVQAGGSLRLSCAASGNISIDRDMGWYRQAPGKERELVASINAGGITNYADSVKGRFTISRDNAKNTVYLQMNSLKPEDTAVYYCAVTTTFGYSALRYHTYWGQGTQVTVSS

SEQ ID NO: 38403 - protein, 118 aa, Artificial Sequence
  Chemically Synthesized
QVQLQESGGGLVQAGGSLRLSCAASGSIFLIGTMGWYRQAPGKEREFVATIGHGANTNYADSVKGRFTISRDNAKNTVYLQMNSLKPEDTAVYYCAVPYGIGRDLYYWGQGTQVTVSS

SEQ ID NO: 38404 - protein, 118 aa, Artificial Sequence
  Chemically Synthesized
QVQLQESGGGLVQAGGSLRLSCAASGYIFYAYIMGWYRQAPGKERELVATINAGATTYYADSVKGRFTISRDNAKNTVYLQMNSLKPEDTAVYYCAVHVIDTNRLAYWGQGTQVTVSS

SEQ ID NO: 38405 - protein, 118 aa, Artificial Sequence
  Chemically Synthesized
QVQLQESGGGLVQAGGSLRLSCAASGTISVLHLMGWYRQAPGKEREFVAGIAYGGTTYYADSVKGRFTISRDNAKNTVYLQMNSLKPEDTAVYYCAVVYTEYVPHLYWGQGTQVTVSS

SEQ ID NO: 38406 - protein, 129 aa, Artificial Sequence
  Chemically Synthesized
QVQLQESGGGLVQAGGSLRLSCAASGTISVTYFMGWYRQAPGKERELVAGIGTGANTYYADSVKGRFTISRDNAKNTVYLQMNSLKPEDTAVYYCAAYIGAPVYGDGQSRNKAKVYDYWGQGTQVTVSS

SEQ ID NO: 38407 - protein, 122 aa, Artificial Sequence
  Chemically Synthesized
QVQLQESGGGLVQAGGSLRLSCAASGSIFDYGVMGWYRQAPGKERELVAGIALGGITYYADSVKGRFTISRDNAKNTVYLQMNSLKPEDTAVYYCAAQYRVDDYAYDYHPYWGQGTQVTVSS

SEQ ID NO: 38408 - protein, 117 aa, Artificial Sequence
  Chemically Synthesized
QVQLQESGGGLVQAGGSLRLSCAASGYISTSYMGWYRQAPGKEREFVATISFGSSTYYADSVKGRFTISRDNAKNTVYLQMNSLKPEDTAVYYCAAIYEFTQDLPYWGQGTQVTVSS

SEQ ID NO: 38409 - protein, 118 aa, Artificial Sequence
  Chemically Synthesized
QVQLQESGGGLVQAGGSLRLSCAASGYISVPPIMGWYRQAPGKEREFVAAIGHGGSTYYADSVKGRFTISRDNAKNTVYLQMNSLKPEDTAVYYCAVDDASWQYHPYWGQGTQVTVSS

SEQ ID NO: 38410 - protein, 126 aa, Artificial Sequence
  Chemically Synthesized
QVQLQESGGGLVQAGGSLRLSCAASGNISELGIMGWYRQAPGKEREFVAGITVGASTNYADSVKGRFTISRDNAKNTVYLQMNSLKPEDTAVYYCAAPGYNYGVYTDSLLDWYYYWGQGTQVTVSS

SEQ ID NO: 38411 - protein, 118 aa, Artificial Sequence
  Chemically Synthesized
QVQLQESGGGLVQAGGSLRLSCAASGNIFGTGYMGWYRQAPGKEREFVASISNGGITYYADSVKGRFTISRDNAKNTVYLQMNSLKPEDTAVYYCAADYIYTDPFVYWGQGTQVTVSS

SEQ ID NO: 38412 - protein, 125 aa, Artificial Sequence
  Chemically Synthesized
QVQLQESGGGLVQAGGSLRLSCAASGSISPRWDMGWYRQAPGKERELVAGIGPGGITNYADSVKGRFTISRDNAKNTVYLQMNSLKPEDTAVYYCAAFKATGYYQSSRTVTTIYWGQGTQVTVSS

SEQ ID NO: 38413 - protein, 117 aa, Artificial Sequence
  Chemically Synthesized
QVQLQESGGGLVQAGGSLRLSCAASGTIFTILNMGWYRQAPGKEREFVPLLMTVVLPYADSVKGRFTISRDNAKNTVYLQMNSLKPEDTAVYYCAVTYSGDDTFKYWGQGTQVTVSS

SEQ ID NO: 38414 - protein, 118 aa, Artificial Sequence
  Chemically Synthesized
QVQLQESGGGLVQAGGSLRLSCAASGNIFPWYWMGWYRQAPGKEREFVATISVGTNTYYADSVKGRFTISRDNAKNTVYLQMNSLKPEDTAVYYCAVQRSYLTIFSYWGQGTQVTVSS

SEQ ID NO: 38415 - protein, 122 aa, Artificial Sequence
  Chemically Synthesized
QVQLQESGGGLVQAGGSLRLSCAASGYIFLWLGMGWYRQAPGKERELVAAIAYGTTTYYADSVKGRFTISRDNAKNTVYLQMNSLKPEDTAVYYCAVATFLFVTPFTNFNYWGQGTQVTVSS

SEQ ID NO: 38416 - protein, 110 aa, Artificial Sequence
  Chemically Synthesized
QVQLQESGGGLVQAGGSLRLSCAASGSIFWYVTMGWYRQAPGKEREFVAGIDPGTITYYADSVKGRFTISRDNAKNTVYLQMNSLKPEDTAVYYCALGYWGQGTQVTVSS

SEQ ID NO: 38417 - protein, 122 aa, Artificial Sequence
  Chemically Synthesized
QVQLQESGGGLVQAGGSLRLSCAASGTIFYGDGMGWYRQAPGKERELVATITYGSTTNYADSVKGRFTISRDNAKNTVYLQMNSLKPEDTAVYYCAAIDGRRYSDNNQHPYWGQGTQVTVSS

SEQ ID NO: 38418 - protein, 117 aa, Artificial Sequence
  Chemically Synthesized
QVQLQESGGGLVQAGGSLRLSCAASGTIFLHYMGWYRQAPGKEREFVAAIGVGATTNYADSVKGRFTISRDNAKNTVYLQMNSLKPEDTAVYYCAVYPYDTVWFVYWGQGTQVTVSS

SEQ ID NO: 38419 - protein, 117 aa, Artificial Sequence
  Chemically Synthesized
QVQLQESGGGLVQAGGSLRLSCAASGNISLGAAMGWYRQAPGKEREFVASITSGSSTYYADSVKGRFTISRDNAKNTVYLQMNSLKPEDTAVYYCAAGNEPSTFIYWGQGTQVTVSS

SEQ ID NO: 38420 - protein, 117 aa, Artificial Sequence
  Chemically Synthesized
QVQLQESGGGLVQAGGSLRLSCAASGSIFGSYDMGWYRQAPGKERELVASINPGGTTNYADSVKGRFTISRDNAKNTVYLQMNSLKPEDTAVYYCAARTDAKSTIYWGQGTQVTVSS

SEQ ID NO: 38421 - protein, 118 aa, Artificial Sequence
  Chemically Synthesized
QVQLQESGGGLVQAGGSLRLSCAASGTIFKRYRMGWYRQAPGKEREFVAAIGWGGTTNYADSVKGRFTISRDNAKNTVYLQMNSLKPEDTAVYYCAAWYDGVVYYNYWGQGTQVTVSS

SEQ ID NO: 38422 - protein, 126 aa, Artificial Sequence
  Chemically Synthesized
QVQLQESGGGLVQAGGSLRLSCAASGTISGPIPMGWYRQAPGKEREFVASIDAGSNTYYADSVKGRFTISRDNAKNTVYLQMNSLKPEDTAVYYCAVLSQRATHDDDAYDIPHVYWGQGTQVTVSS

SEQ ID NO: 38423 - protein, 122 aa, Artificial Sequence
  Chemically Synthesized
QVQLQESGGGLVQAGGSLRLSCAASGNISYYWGMGWYRQAPGKERELVAGIGYGASTYYADSVKGRFTISRDNAKNTVYLQMNSLKPEDTAVYYCAVRNWFYGRHYYDHSYWGQGTQVTVSS

SEQ ID NO: 38424 - protein, 118 aa, Artificial Sequence
  Chemically Synthesized
QVQLQESGGGLVQAGGSLRLSCAASGYISDVYIMGWYRQAPGKERELVASIDLGANTYYADSVKGRFTISRDNAKNTVYLQMNSLKPEDTAVYYCAASGTDPVDHSYWGQGTQVTVSS

SEQ ID NO: 38425 - protein, 118 aa, Artificial Sequence
  Chemically Synthesized
QVQLQESGGGLVQAGGSLRLSCAASGTISYYRDMGWYRQAPGKEREFVASISGGASTYYADSVKGRFTISRDNAKNTVYLQMNSLKPEDTAVYYCAVRKWYRYIYSYWGQGTQVTVSS

SEQ ID NO: 38426 - protein, 122 aa, Artificial Sequence
  Chemically Synthesized
QVQLQESGGGLVQAGGSLRLSCAASGYIFHLVVMGWYRQAPGKERELVAAIGTGSNTYYADSVKGRFTISRDNAKNTVYLQMNSLKPEDTAVYYCAVYDLDVYRNIPIHTYWGQGTQVTVSS

SEQ ID NO: 38427 - protein, 118 aa, Artificial Sequence
  Chemically Synthesized
QVQLQESGGGLVQAGGSLRLSCAASGSISYNLLMGWYRQAPGKEREFVAGITWGATTNYADSVKGRFTISRDNAKNTVYLQMNSLKPEDTAVYYCAVHDYSGDYHYYWGQGTQVTVSS

SEQ ID NO: 38428 - protein, 117 aa, Artificial Sequence
  Chemically Synthesized
QVQLQESGGGLVQAGGSLRLSCAASGSISYSTMGWYRQAPGKEREFVATIGAGGTTYYADSVKGRFTISRDNAKNTVYLQMNSLKPEDTAVYYCAVPSRLVDSFDYWGQGTQVTVSS

SEQ ID NO: 38429 - protein, 117 aa, Artificial Sequence
  Chemically Synthesized
QVQLQESGGGLVQAGGSLRLSCAASGSIFPSYVMGWYRQAPGKEREFVAGITGGAITNYADSVKGRFTISRDNAKNTVYLQMNSLKPEDTAVYYCAVYDDLPSLIYWGQGTQVTVSS

SEQ ID NO: 38430 - protein, 126 aa, Artificial Sequence
  Chemically Synthesized
QVQLQESGGGLVQAGGSLRLSCAASGTISPAGYMGWYRQAPGKERELVASIALGTSTNYADSVKGRFTISRDNAKNTVYLQMNSLKPEDTAVYYCAVKQLIGDYADDAVWYYHIYWGQGTQVTVSS

SEQ ID NO: 38431 - protein, 122 aa, Artificial Sequence
  Chemically Synthesized
QVQLQESGGGLVQAGGSLRLSCAASGTISHRISMGWYRQAPGKERELVATITIGGTTYYADSVKGRFTISRDNAKNTVYLQMNSLKPEDTAVYYCAARRGYHYQGRARLLYWGQGTQVTVSS

SEQ ID NO: 38432 - protein, 126 aa, Artificial Sequence
  Chemically Synthesized
QVQLQESGGGLVQAGGSLRLSCAASGTIFYYVYMGWYRQAPGKEREFVAAISAGGNTNYADSVKGRFTISRDNAKNTVYLQMNSLKPEDTAVYYCAVKTTGAARTYSYYTYIYLYWGQGTQVTVSS

SEQ ID NO: 38433 - protein, 122 aa, Artificial Sequence
  Chemically Synthesized
QVQLQESGGGLVQAGGSLRLSCAASGYIFREPVMGWYRQAPGKERELVAAINVGTTTYYADSVKGRFTISRDNAKNTVYLQMNSLKPEDTAVYYCAVSSSGDPTAYADLPYWGQGTQVTVSS

SEQ ID NO: 38434 - protein, 121 aa, Artificial Sequence
  Chemically Synthesized
QVQLQESGGGLVQAGGSLRLSCAASGTIFVTEYMGWYRQAPGKERELVAAINGGANTNYADSVKGRFTISRDNAKNTVYLQMNSLKPEDTAVYYCAASLESLLTFSVTFYWGQGTQVTVSS

SEQ ID NO: 38435 - protein, 118 aa, Artificial Sequence
  Chemically Synthesized
QVQLQESGGGLVQAGGSLRLSCAASGYISHWNVMGWYRQAPGKEREFVAGINTGGSTYYADSVKGRFTISRDNAKNTVYLQMNSLKPEDTAVYYCAVALGRTYRHRYWGQGTQVTVSS

SEQ ID NO: 38436 - protein, 118 aa, Artificial Sequence
  Chemically Synthesized
QVQLQESGGGLVQAGGSLRLSCAASGNIFARYGMGWYRQAPGKERELVAAISYGGTTNYADSVKGRFTISRDNAKNTVYLQMNSLKPEDTAVYYCAAGRRRWRAHSYWGQGTQVTVSS

SEQ ID NO: 38437 - protein, 121 aa, Artificial Sequence
  Chemically Synthesized
QVQLQESGGGLVQAGGSLRLSCAASGTIFASTMGWYRQAPGKEREFVAGIATGASTNYADSVKGRFTISRDNAKNTVYLQMNSLKPEDTAVYYCAVTAYADYFALVRYIYWGQGTQVTVSS

SEQ ID NO: 38438 - protein, 109 aa, Artificial Sequence
  Chemically Synthesized
QVQLQESGGGLVQAGGSLRLSCAASGYISQLYYMGWYRQAPGKERELVAAIDWGTSTYYADSVKGRFTISRDNAKNTVYLQMNSLKPEDTAVYYCADYWGQGTQVTVSS

SEQ ID NO: 38439 - protein, 118 aa, Artificial Sequence
  Chemically Synthesized
QVQLQESGGGLVQAGGSLRLSCAASGYISSRADMGWYRQAPGKERELVAAISIGATTYYADSVKGRFTISRDNAKNTVYLQMNSLKPEDTAVYYCAVYQYDFTGYDYWGQGTQVTVSS

SEQ ID NO: 38440 - protein, 118 aa, Artificial Sequence
  Chemically Synthesized
QVQLQESGGGLVQAGGSLRLSCAASGTIFGPRVMGWYRQAPGKEREFVASIGSGATTNYADSVKGRFTISRDNAKNTVYLQMNSLKPEDTAVYYCAVGPAVNPYHDYWGQGTQVTVSS

SEQ ID NO: 38441 - protein, 118 aa, Artificial Sequence
  Chemically Synthesized
QVQLQESGGGLVQAGGSLRLSCAASGSIFPPDSMGWYRQAPGKEREFVAAINPGGNTYYADSVKGRFTISRDNAKNTVYLQMNSLKPEDTAVYYCAVDGYIYRGLTYWGQGTQVTVSS

SEQ ID NO: 38442 - protein, 122 aa, Artificial Sequence
  Chemically Synthesized
QVQLQESGGGLVQAGGSLRLSCAASGSIFDGYDMGWYRQAPGKERELVAGIGGGSNTNYADSVKGRFTISRDNAKNTVYLQMNSLKPEDTAVYYCAAEADTGWTTRRVYYYWGQGTQVTVSS

SEQ ID NO: 38443 - protein, 118 aa, Artificial Sequence
  Chemically Synthesized
QVQLQESGGGLVQAGGSLRLSCAASGYIFYQLTMGWYRQAPGKERELVAGISDGSTTYYADSVKGRFTISRDNAKNTVYLQMNSLKPEDTAVYYCAAKGVYLYYHYYWGQGTQVTVSS

SEQ ID NO: 38444 - protein, 118 aa, Artificial Sequence
  Chemically Synthesized
QVQLQESGGGLVQAGGSLRLSCAASGSISVSDTMGWYRQAPGKEREFVASITYGATTNYADSVKGRFTISRDNAKNTVYLQMNSLKPEDTAVYYCAVGSDLYRVHSYWGQGTQVTVSS

SEQ ID NO: 38445 - protein, 118 aa, Artificial Sequence
  Chemically Synthesized
QVQLQESGGGLVQAGGSLRLSCAASGNIFSPAVMGWYRQAPGKERELVASISRGGSTNYADSVKGRFTISRDNAKNTVYLQMNSLKPEDTAVYYCAVNDTAYSAHRYWGQGTQVTVSS

SEQ ID NO: 38446 - protein, 118 aa, Artificial Sequence
  Chemically Synthesized
QVQLQESGGGLVQAGGSLRLSCAASGNISTDRVMGWYRQAPGKEREFVAAIGVGASTNYADSVKGRFTISRDNAKNTVYLQMNSLKPEDTAVYYCAVVIGTYYLPYYWGQGTQVTVSS

SEQ ID NO: 38447 - protein, 121 aa, Artificial Sequence
  Chemically Synthesized
QVQLQESGGGLVQAGGSLRLSCAASGTIFAPRAMGWYRQAPGKEREFVAAISRGANTYYADSVKGRFTISRDNAKNTVYLQMNSLKPEDTAVYYCAVLDHSISMLLVSMYWGQGTQVTVSS

SEQ ID NO: 38448 - protein, 121 aa, Artificial Sequence
  Chemically Synthesized
QVQLQESGGGLVQAGGSLRLSCAASGTISSFTMGWYRQAPGKERELVAGIADGGSTNYADSVKGRFTISRDNAKNTVYLQMNSLKPEDTAVYYCAAGGGKLAYVFTVLDYWGQGTQVTVSS

SEQ ID NO: 38449 - protein, 122 aa, Artificial Sequence
  Chemically Synthesized
QVQLQESGGGLVQAGGSLRLSCAASGSIFGPPYMGWYRQAPGKEREFVASISVGTNTNYADSVKGRFTISRDNAKNTVYLQMNSLKPEDTAVYYCAAYLWDQWDDLYAYRYWGQGTQVTVSS

SEQ ID NO: 38450 - protein, 118 aa, Artificial Sequence
  Chemically Synthesized
QVQLQESGGGLVQAGGSLRLSCAASGSISPLDPMGWYRQAPGKEREFVAAIGGGATTYYADSVKGRFTISRDNAKNTVYLQMNSLKPEDTAVYYCAVARTWDRALEYWGQGTQVTVSS

SEQ ID NO: 38451 - protein, 122 aa, Artificial Sequence
  Chemically Synthesized
QVQLQESGGGLVQAGGSLRLSCAASGSIFPRKAMGWYRQAPGKERELVASIGYGSNTYYADSVKGRFTISRDNAKNTVYLQMNSLKPEDTAVYYCAVRYRYDRGAIYAFSYWGQGTQVTVSS

SEQ ID NO: 38452 - protein, 118 aa, Artificial Sequence
  Chemically Synthesized
QVQLQESGGGLVQAGGSLRLSCAASGSIFGISYMGWYRQAPGKEREFVAAITYGTITNYADSVKGRFTISRDNAKNTVYLQMNSLKPEDTAVYYCAALGRVGAGYYYWGQGTQVTVSS

SEQ ID NO: 38453 - protein, 118 aa, Artificial Sequence
  Chemically Synthesized
QVQLQESGGGLVQAGGSLRLSCAASGTIFFGARMGWYRQAPGKERELVATINQGTSTNYADSVKGRFTISRDNAKNTVYLQMNSLKPEDTAVYYCAVYRRGDDKHYYWGQGTQVTVSS

SEQ ID NO: 38454 - protein, 125 aa, Artificial Sequence
  Chemically Synthesized
QVQLQESGGGLVQAGGSLRLSCAASGSIFLLEWMGWYRQAPGKERELVASISAGSITNYADSVKGRFTISRDNAKNTVYLQMNSLKPEDTAVYYCAVRPDPYTYAWTAIARHDYWGQGTQVTVSS

SEQ ID NO: 38455 - protein, 126 aa, Artificial Sequence
  Chemically Synthesized
QVQLQESGGGLVQAGGSLRLSCAASGTIFYTYNMGWYRQAPGKERELVAAITSGSTTYYADSVKGRFTISRDNAKNTVYLQMNSLKPEDTAVYYCAVLYYYVASLANDYPLDYDYWGQGTQVTVSS

SEQ ID NO: 38456 - protein, 122 aa, Artificial Sequence
  Chemically Synthesized
QVQLQESGGGLVQAGGSLRLSCAASGNISDNYYMGWYRQAPGKEREFVASITGGTTTNYADSVKGRFTISRDNAKNTVYLQMNSLKPEDTAVYYCAVGYWTYGRVDQYYPYWGQGTQVTVSS

SEQ ID NO: 38457 - protein, 118 aa, Artificial Sequence
  Chemically Synthesized
QVQLQESGGGLVQAGGSLRLSCAASGSISDAAFMGWYRQAPGKERELVAGIGDGAITYYADSVKGRFTISRDNAKNTVYLQMNSLKPEDTAVYYCAAALTISYHHYYWGQGTQVTVSS

SEQ ID NO: 38458 - protein, 122 aa, Artificial Sequence
  Chemically Synthesized
QVQLQESGGGLVQAGGSLRLSCAASGTISRVRFMGWYRQAPGKEREFVASISRGTITYYADSVKGRFTISRDNAKNTVYLQMNSLKPEDTAVYYCAAETYGWYYYDNIHYYWGQGTQVTVSS

SEQ ID NO: 38459 - protein, 117 aa, Artificial Sequence
  Chemically Synthesized
QVQLQESGGGLVQAGGSLRLSCAASGYIFRSYMGWYRQAPGKEREFVAAIDSGTSTYYADSVKGRFTISRDNAKNTVYLQMNSLKPEDTAVYYCAADYAYELYLGYWGQGTQVTVSS

SEQ ID NO: 38460 - protein, 117 aa, Artificial Sequence
  Chemically Synthesized
QVQLQESGGGLVQAGGSLRLSCAASGTIFFYRYMGWYRQAPGKERELVATITLGATTYYADSVKGRFTISRDNAKNTVYLQMNSLKPEDTAVYYCAATRFYAYHRYWGQGTQVTVSS

SEQ ID NO: 38461 - protein, 126 aa, Artificial Sequence
  Chemically Synthesized
QVQLQESGGGLVQAGGSLRLSCAASGNIFFSQAMGWYRQAPGKEREFVAGISQGSTTNYADSVKGRFTISRDNAKNTVYLQMNSLKPEDTAVYYCAVGPRSLSGTPWTGPAAYNYWGQGTQVTVSS

SEQ ID NO: 38462 - protein, 122 aa, Artificial Sequence
  Chemically Synthesized
QVQLQESGGGLVQAGGSLRLSCAASGTIFLGPAMGWYRQAPGKEREFVAAITQGGTTYYADSVKGRFTISRDNAKNTVYLQMNSLKPEDTAVYYCAVAFAITEGTYYPLAYWGQGTQVTVSS

SEQ ID NO: 38463 - protein, 118 aa, Artificial Sequence
  Chemically Synthesized
QVQLQESGGGLVQAGGSLRLSCAASGNIFDYYAMGWYRQAPGKERELVATIDGGTTTYYADSVKGRFTISRDNAKNTVYLQMNSLKPEDTAVYYCAAEPPDVDNYGYWGQGTQVTVSS

SEQ ID NO: 38464 - protein, 120 aa, Artificial Sequence
  Chemically Synthesized
QVQLQESGGGLVQAGGSLRLSCAASGTIFLPRTMGWYRQAPGKEREFVAGIDRGYYQYADSVKGRFTISRDNAKNTVYLQMNSLKPEDTAVYYCAAYEYVGDVYPYFKYWGQGTQVTVSS

SEQ ID NO: 38465 - protein, 125 aa, Artificial Sequence
  Chemically Synthesized
QVQLQESGGGLVQAGGSLRLSCAASGTISSDYQMGWYRQAPGKEREFVAGINYGSSTYYADSVKGRFTISRDNAKNTVYLQMNSLKPEDTAVYYCAAQYGLLYNTYTWYFDYFYWGQGTQVTVSS

SEQ ID NO: 38466 - protein, 122 aa, Artificial Sequence
  Chemically Synthesized
QVQLQESGGGLVQAGGSLRLSCAASGTISGGNYMGWYRQAPGKERELVASIATGTNTNYADSVKGRFTISRDNAKNTVYLQMNSLKPEDTAVYYCAVHRAPKGFYADYHGYWGQGTQVTVSS

SEQ ID NO: 38467 - protein, 118 aa, Artificial Sequence
  Chemically Synthesized
QVQLQESGGGLVQAGGSLRLSCAASGNIFDVDHMGWYRQAPGKEREFVASITDGASTNYADSVKGRFTISRDNAKNTVYLQMNSLKPEDTAVYYCAAIDFADGYLDYWGQGTQVTVSS

SEQ ID NO: 38468 - protein, 118 aa, Artificial Sequence
  Chemically Synthesized
QVQLQESGGGLVQAGGSLRLSCAASGSISYAWYMGWYRQAPGKERELVATINDGGTTNYADSVKGRFTISRDNAKNTVYLQMNSLKPEDTAVYYCAAWGDLLHVYDYWGQGTQVTVSS

SEQ ID NO: 38469 - protein, 121 aa, Artificial Sequence
  Chemically Synthesized
QVQLQESGGGLVQAGGSLRLSCAASGSISPYNYMGWYRQAPGKERELVATIGLGASTNYADSVKGRFTISRDNAKNTVYLQMNSLKPEDTAVYYCAAHISYRQRDYWHQYWGQGTQVTVSS

SEQ ID NO: 38470 - protein, 118 aa, Artificial Sequence
  Chemically Synthesized
QVQLQESGGGLVQAGGSLRLSCAASGTISAYTVMGWYRQAPGKERELVAAITHGTNTYYADSVKGRFTISRDNAKNTVYLQMNSLKPEDTAVYYCAAEPYWGATYQYWGQGTQVTVSS

SEQ ID NO: 38471 - protein, 122 aa, Artificial Sequence
  Chemically Synthesized
QVQLQESGGGLVQAGGSLRLSCAASGNISGIITMGWYRQAPGKERELVAAIDYGSTTYYADSVKGRFTISRDNAKNTVYLQMNSLKPEDTAVYYCAVWYGVYPRILSLLVYWGQGTQVTVSS

SEQ ID NO: 38472 - protein, 117 aa, Artificial Sequence
  Chemically Synthesized
QVQLQESGGGLVQAGGSLRLSCAASGSISDNYYMGWYRQAPGKERELVAAISNGGNTYYADSVKGRFTISRDNAKNTVYLQMNSLKPEDTAVYYCAAVPIYINYAYWGQGTQVTVSS

SEQ ID NO: 38473 - protein, 118 aa, Artificial Sequence
  Chemically Synthesized
QVQLQESGGGLVQAGGSLRLSCAASGSIFGGPPMGWYRQAPGKERELVAGIGAGATTNYADSVKGRFTISRDNAKNTVYLQMNSLKPEDTAVYYCAVYDGSGTGYSYWGQGTQVTVSS

SEQ ID NO: 38474 - protein, 122 aa, Artificial Sequence
  Chemically Synthesized
QVQLQESGGGLVQAGGSLRLSCAASGYISWHYDMGWYRQAPGKERELVAAIGRGTNTYYADSVKGRFTISRDNAKNTVYLQMNSLKPEDTAVYYCAASRGSSEAGRVGHQYWGQGTQVTVSS

SEQ ID NO: 38475 - protein, 118 aa, Artificial Sequence
  Chemically Synthesized
QVQLQESGGGLVQAGGSLRLSCAASGNIFATSGMGWYRQAPGKERELVAAITEGASTYYADSVKGRFTISRDNAKNTVYLQMNSLKPEDTAVYYCAASYQQLYDFYYWGQGTQVTVSS

SEQ ID NO: 38476 - protein, 118 aa, Artificial Sequence
  Chemically Synthesized
QVQLQESGGGLVQAGGSLRLSCAASGNIFYFRAMGWYRQAPGKEREFVAAIGRGGTTYYADSVKGRFTISRDNAKNTVYLQMNSLKPEDTAVYYCAVIAYSTLLHDYWGQGTQVTVSS

SEQ ID NO: 38477 - protein, 122 aa, Artificial Sequence
  Chemically Synthesized
QVQLQESGGGLVQAGGSLRLSCAASGTISAQRYMGWYRQAPGKEREFVAAIARGGNTYYADSVKGRFTISRDNAKNTVYLQMNSLKPEDTAVYYCAARNRYGANAPRIHRYWGQGTQVTVSS

SEQ ID NO: 38478 - protein, 119 aa, Artificial Sequence
  Chemically Synthesized
QVQLQESGGGLVQAGGSLRLSCAASGTISDREYMGWYRQAPGKEREFVAAITQNTYADSVKGRFTISRDNAKNTVYLQMNSLKPEDTAVYYCAAQRTDGEGADVVLDYWGQGTQVTVSS

SEQ ID NO: 38479 - protein, 125 aa, Artificial Sequence
  Chemically Synthesized
QVQLQESGGGLVQAGGSLRLSCAASGNISYTYAMGWYRQAPGKERELVASIAIGTITYYADSVKGRFTISRDNAKNTVYLQMNSLKPEDTAVYYCAAGSPSVTTTLMVSTLTFYWGQGTQVTVSS

SEQ ID NO: 38480 - protein, 122 aa, Artificial Sequence
  Chemically Synthesized
QVQLQESGGGLVQAGGSLRLSCAASGNISRYYGMGWYRQAPGKERELVATIGRGSTTNYADSVKGRFTISRDNAKNTVYLQMNSLKPEDTAVYYCAADTVYDYVLWYRFQYWGQGTQVTVSS

SEQ ID NO: 38481 - protein, 118 aa, Artificial Sequence
  Chemically Synthesized
QVQLQESGGGLVQAGGSLRLSCAASGSIFDGSGMGWYRQAPGKEREFVATISIGATTYYADSVKGRFTISRDNAKNTVYLQMNSLKPEDTAVYYCAAASRVYDAHVYWGQGTQVTVSS

SEQ ID NO: 38482 - protein, 118 aa, Artificial Sequence
  Chemically Synthesized
QVQLQESGGGLVQAGGSLRLSCAASGNIFAGVSMGWYRQAPGKERELVASIASGANTYYADSVKGRFTISRDNAKNTVYLQMNSLKPEDTAVYYCAARYGVDGYLTYWGQGTQVTVSS

SEQ ID NO: 38483 - protein, 126 aa, Artificial Sequence
  Chemically Synthesized
QVQLQESGGGLVQAGGSLRLSCAASGSISEIDWMGWYRQAPGKEREFVATIDQGANTYYADSVKGRFTISRDNAKNTVYLQMNSLKPEDTAVYYCAVGDPRAYTDPQVLYAAFGYWGQGTQVTVSS

SEQ ID NO: 38484 - protein, 118 aa, Artificial Sequence
  Chemically Synthesized
QVQLQESGGGLVQAGGSLRLSCAASGNIFRRSAMGWYRQAPGKERELVATINGGSNTNYADSVKGRFTISRDNAKNTVYLQMNSLKPEDTAVYYCAVPQPANNLHEYWGQGTQVTVSS

SEQ ID NO: 38485 - protein, 118 aa, Artificial Sequence
  Chemically Synthesized
QVQLQESGGGLVQAGGSLRLSCAASGSISFHWRMGWYRQAPGKERELVAAITSGGNTYYADSVKGRFTISRDNAKNTVYLQMNSLKPEDTAVYYCAVYAKRGVNYIYWGQGTQVTVSS

SEQ ID NO: 38486 - protein, 118 aa, Artificial Sequence
  Chemically Synthesized
QVQLQESGGGLVQAGGSLRLSCAASGTISSRRPMGWYRQAPGKEREFVASITWGTTTYYADSVKGRFTISRDNAKNTVYLQMNSLKPEDTAVYYCAAGYYVVSVHLYWGQGTQVTVSS

SEQ ID NO: 38487 - protein, 121 aa, Artificial Sequence
  Chemically Synthesized
QVQLQESGGGLVQAGGSLRLSCAASGSISDYYMGWYRQAPGKEREFVAGITGGTTTNYADSVKGRFTISRDNAKNTVYLQMNSLKPEDTAVYYCAADVYDDPYDSPLYDYWGQGTQVTVSS

SEQ ID NO: 38488 - protein, 118 aa, Artificial Sequence
  Chemically Synthesized
QVQLQESGGGLVQAGGSLRLSCAASGSIFTTSLMGWYRQAPGKERELVAAIGDGSTTYYADSVKGRFTISRDNAKNTVYLQMNSLKPEDTAVYYCAAPDAAEHIHSYWGQGTQVTVSS

SEQ ID NO: 38489 - protein, 126 aa, Artificial Sequence
  Chemically Synthesized
QVQLQESGGGLVQAGGSLRLSCAASGYIFGYSDMGWYRQAPGKEREFVATISSGTITNYADSVKGRFTISRDNAKNTVYLQMNSLKPEDTAVYYCAVRIRDDTYVPLSYRLDHLYWGQGTQVTVSS

SEQ ID NO: 38490 - protein, 121 aa, Artificial Sequence
  Chemically Synthesized
QVQLQESGGGLVQAGGSLRLSCAASGTISRSKMGWYRQAPGKERELVAGIAVGSITNYADSVKGRFTISRDNAKNTVYLQMNSLKPEDTAVYYCAVSGPDLYDDHRGYPYWGQGTQVTVSS

SEQ ID NO: 38491 - protein, 118 aa, Artificial Sequence
  Chemically Synthesized
QVQLQESGGGLVQAGGSLRLSCAASGTIFWAPVMGWYRQAPGKEREFVATIANGTTTNYADSVKGRFTISRDNAKNTVYLQMNSLKPEDTAVYYCAVAVADYTGFAYWGQGTQVTVSS

SEQ ID NO: 38492 - protein, 117 aa, Artificial Sequence
  Chemically Synthesized
QVQLQESGGGLVQAGGSLRLSCAASGNISATFMGWYRQAPGKERELVATISYGATTNYADSVKGRFTISRDNAKNTVYLQMNSLKPEDTAVYYCAVDQEFYYYHQYWGQGTQVTVSS

SEQ ID NO: 38493 - protein, 126 aa, Artificial Sequence
  Chemically Synthesized
QVQLQESGGGLVQAGGSLRLSCAASGYIFYLGLMGWYRQAPGKERELVATIGVGTSTNYADSVKGRFTISRDNAKNTVYLQMNSLKPEDTAVYYCAASPHEYAWHYYGWSYPFAYWGQGTQVTVSS

SEQ ID NO: 38494 - protein, 117 aa, Artificial Sequence
  Chemically Synthesized
QVQLQESGGGLVQAGGSLRLSCAASGTISGVYYMGWYRQAPGKEREFVAAINVGATTNYADSVKGRFTISRDNAKNTVYLQMNSLKPEDTAVYYCAVPKDPAGLQYWGQGTQVTVSS

SEQ ID NO: 38495 - protein, 118 aa, Artificial Sequence
  Chemically Synthesized
QVQLQESGGGLVQAGGSLRLSCAASGYISRYPVMGWYRQAPGKEREFVAAIDNGTSTNYADSVKGRFTISRDNAKNTVYLQMNSLKPEDTAVYYCAAQYDYGDYHGYWGQGTQVTVSS

SEQ ID NO: 38496 - protein, 118 aa, Artificial Sequence
  Chemically Synthesized
QVQLQESGGGLVQAGGSLRLSCAASGTIFERLIMGWYRQAPGKERELVATISVGTTTYYADSVKGRFTISRDNAKNTVYLQMNSLKPEDTAVYYCAADYSGDDYYNYWGQGTQVTVSS

SEQ ID NO: 38497 - protein, 118 aa, Artificial Sequence
  Chemically Synthesized
QVQLQESGGGLVQAGGSLRLSCAASGSISADYDMGWYRQAPGKERELVATIKYQYADSVKGRFTISRDNAKNTVYLQMNSLKPEDTAVYYCAAGLYRSAYYDAFYGYWGQGTQVTVSS

SEQ ID NO: 38498 - protein, 122 aa, Artificial Sequence
  Chemically Synthesized
QVQLQESGGGLVQAGGSLRLSCAASGTISVPYYMGWYRQAPGKERELVASINHGGNTYYADSVKGRFTISRDNAKNTVYLQMNSLKPEDTAVYYCAVWGPGYARPAEEYAYWGQGTQVTVSS

SEQ ID NO: 38499 - protein, 122 aa, Artificial Sequence
  Chemically Synthesized
QVQLQESGGGLVQAGGSLRLSCAASGNIFAPYTMGWYRQAPGKEREFVAGITYGGSTNYADSVKGRFTISRDNAKNTVYLQMNSLKPEDTAVYYCAAHWRSYYTLVYPHRYWGQGTQVTVSS

SEQ ID NO: 38500 - protein, 118 aa, Artificial Sequence
  Chemically Synthesized
QVQLQESGGGLVQAGGSLRLSCAASGNISRVPNMGWYRQAPGKEREFVAGIASGATTNYADSVKGRFTISRDNAKNTVYLQMNSLKPEDTAVYYCAVGYNRQTGHNYWGQGTQVTVSS

SEQ ID NO: 38501 - protein, 121 aa, Artificial Sequence
  Chemically Synthesized
QVQLQESGGGLVQAGGSLRLSCAASGTFLTVFMGWYRQAPGKEREFVASITLGTTTYYADSVKGRFTISRDNAKNTVYLQMNSLKPEDTAVYYCAAADWDFEYRDVAHDYWGQGTQVTVSS

SEQ ID NO: 38502 - protein, 115 aa, Artificial Sequence
  Chemically Synthesized
QVQLQESGGGLVQAGGSLRLSCAASGSISYEDYMGWYRQAPGKERELVAGIDFGTSTNYADSVKGRFTISRDNAKNTVYLQMNSLKPEDTAVYYCAAYYYVYPYWGQGTQVTVSS

SEQ ID NO: 38503 - protein, 122 aa, Artificial Sequence
  Chemically Synthesized
QVQLQESGGGLVQAGGSLRLSCAASGSIFGYAVMGWYRQAPGKERELVATIAIGGSTNYADSVKGRFTISRDNAKNTVYLQMNSLKPEDTAVYYCAALRWQKHDTGSLHSYWGQGTQVTVSS

SEQ ID NO: 38504 - protein, 126 aa, Artificial Sequence
  Chemically Synthesized
QVQLQESGGGLVQAGGSLRLSCAASGTISGLTSMGWYRQAPGKEREFVAGIALGSNTNYADSVKGRFTISRDNAKNTVYLQMNSLKPEDTAVYYCAAVRYVATRNSPDGAVVHYYWGQGTQVTVSS

SEQ ID NO: 38505 - protein, 125 aa, Artificial Sequence
  Chemically Synthesized
QVQLQESGGGLVQAGGSLRLSCAASGNISPRSYMGWYRQAPGKEREFVASISEGTNTYADSVKGRFTISRDNAKNTVYLQMNSLKPEDTAVYYCAATYKDPYYSQVNVRRSHYYWGQGTQVTVSS

SEQ ID NO: 38506 - protein, 119 aa, Artificial Sequence
  Chemically Synthesized
QVQLQESGGGLVQAGGSLRLSCAASGNIFHDDTMGWYRQAPGKERELVATITTGGSTNYADSVKGRFTISRDNAKNTVYLQMNSLKPEDTAVYYCAAYYYDSQTRHDYWGQGTQVTVSS

SEQ ID NO: 38507 - protein, 122 aa, Artificial Sequence
  Chemically Synthesized
QVQLQESGGGLVQAGGSLRLSCAASGNISKTISMGWYRQAPGKERELVAGISNGGNTNYADSVKGRFTISRDNAKNTVYLQMNSLKPEDTAVYYCAADYYSRVTATVLYPYWGQGTQVTVSS

SEQ ID NO: 38508 - protein, 115 aa, Artificial Sequence
  Chemically Synthesized
QVQLQESGGGLVQAGGSLRLSCAASGSISSDTYMGWYRQAPGKERELVATISDGTYADSVKGRFTISRDNAKNTVYLQMNSLKPEDTAVYYCAAVQVDIIRHVYWGQGTQVTVSS

SEQ ID NO: 38509 - protein, 121 aa, Artificial Sequence
  Chemically Synthesized
QVQLQESGGGLVQAGGSLRLSCAASGTIFDLIEMGWYRQAPGKERELVAAIDPGAITYYADSVKGRFTISRDNAKNTVYLQMNSLKPEDTAVYYCAVYDEQGSHSTTCMYWGQGTQVTVSS

SEQ ID NO: 38510 - protein, 126 aa, Artificial Sequence
  Chemically Synthesized
QVQLQESGGGLVQAGGSLRLSCAASGNISEQYTMGWYRQAPGKERELVATISYGTNTNYADSVKGRFTISRDNAKNTVYLQMNSLKPEDTAVYYCAVTYYRTHDGYIDTAKYYGYWGQGTQVTVSS

SEQ ID NO: 38511 - protein, 124 aa, Artificial Sequence
  Chemically Synthesized
QVQLQESGGGLVQAGGSLRLSCAASGTISEWWNMGWYRQAPGKERELVAGIASGANYADSVKGRFTISRDNAKNTVYLQMNSLKPEDTAVYYCAVGDNGSYGVVYVDGAPHYYWGQGTQVTVSS

SEQ ID NO: 38512 - protein, 112 aa, Artificial Sequence
  Chemically Synthesized
QVQLQESGGGLVQAGGSLRLSCAASGTISVDRGMGWYRQAPGKERELVATINNGGITNYADSVKGRFTISRDNAKNTVYLQMNSLKPEDTAVYYCADTFYYWGQGTQVTVSS

SEQ ID NO: 38513 - protein, 118 aa, Artificial Sequence
  Chemically Synthesized
QVQLQESGGGLVQAGGSLRLSCAASGSIFWADEMGWYRQAPGKEREFVATITSGSITNYADSVKGRFTISRDNAKNTVYLQMNSLKPEDTAVYYCAVYDTYDALFYYWGQGTQVTVSS

SEQ ID NO: 38514 - protein, 112 aa, Artificial Sequence
  Chemically Synthesized
QVQLQESGGGLVQAGGSLRLSCAASGNIFDYISMGWYRQAPGKERELVATITLGAITYYADSVKGRFTISRDNAKNTVYLQMNSLKPEDTAVYYCAVYLWYWGQGTQVTVSS

SEQ ID NO: 38515 - protein, 118 aa, Artificial Sequence
  Chemically Synthesized
QVQLQESGGGLVQAGGSLRLSCAASGSIFGRRGMGWYRQAPGKERELVATIGGGTITNYADSVKGRFTISRDNAKNTVYLQMNSLKPEDTAVYYCAADDEYYYYHIYWGQGTQVTVSS

SEQ ID NO: 38516 - protein, 118 aa, Artificial Sequence
  Chemically Synthesized
QVQLQESGGGLVQAGGSLRLSCAASGTISGLPYMGWYRQAPGKERELVASITPGAITYYADSVKGRFTISRDNAKNTVYLQMNSLKPEDTAVYYCAALLYDYHWLYYWGQGTQVTVSS

SEQ ID NO: 38517 - protein, 126 aa, Artificial Sequence
  Chemically Synthesized
QVQLQESGGGLVQAGGSLRLSCAASGSIFYGYTMGWYRQAPGKERELVAAIDTGATTNYADSVKGRFTISRDNAKNTVYLQMNSLKPEDTAVYYCAVYEDRTPFAYHYDPRDHTYWGQGTQVTVSS

SEQ ID NO: 38518 - protein, 122 aa, Artificial Sequence
  Chemically Synthesized
QVQLQESGGGLVQAGGSLRLSCAASGTISYYTAMGWYRQAPGKEREFVATITAGTTTYYADSVKGRFTISRDNAKNTVYLQMNSLKPEDTAVYYCAAGYTSLPWSGHWLLYWGQGTQVTVSS

SEQ ID NO: 38519 - protein, 118 aa, Artificial Sequence
  Chemically Synthesized
QVQLQESGGGLVQAGGSLRLSCAASGTIFEQYDMGWYRQAPGKEREFVASINYGTTTNYADSVKGRFTISRDNAKNTVYLQMNSLKPEDTAVYYCAVIVGVLYDHQYWGQGTQVTVSS

SEQ ID NO: 38520 - protein, 118 aa, Artificial Sequence
  Chemically Synthesized
QVQLQESGGGLVQAGGSLRLSCAASGNIFFSWDMGWYRQAPGKERELVASIDSGSITNYADSVKGRFTISRDNAKNTVYLQMNSLKPEDTAVYYCAAGSGRLWGHNYWGQGTQVTVSS

SEQ ID NO: 38521 - protein, 113 aa, Artificial Sequence
  Chemically Synthesized
QVQLQESGGGLVQAGGSLRLSCAASGTIFDPTEMGWYRQAPGKERELVAGITYGTITNYADSVKGRFTISRDNAKNTVYLQMNSLKPEDTAVYYCAADTHDYWGQGTQVTVSS

SEQ ID NO: 38522 - protein, 118 aa, Artificial Sequence
  Chemically Synthesized
QVQLQESGGGLVQAGGSLRLSCAASGNISDLSVMGWYRQAPGKEREFVAAIGDGAITYYADSVKGRFTISRDNAKNTVYLQMNSLKPEDTAVYYCAAYDARFGAHPYWGQGTQVTVSS

SEQ ID NO: 38523 - protein, 122 aa, Artificial Sequence
  Chemically Synthesized
QVQLQESGGGLVQAGGSLRLSCAASGTISDGGDMGWYRQAPGKEREFVAAIGGGSSTYYADSVKGRFTISRDNAKNTVYLQMNSLKPEDTAVYYCAVDVYYWEDPTDTLDYWGQGTQVTVSS

SEQ ID NO: 38524 - protein, 118 aa, Artificial Sequence
  Chemically Synthesized
QVQLQESGGGLVQAGGSLRLSCAASGNISVYRYMGWYRQAPGKEREFVAGIDNGTTTNYADSVKGRFTISRDNAKNTVYLQMNSLKPEDTAVYYCAAWWDGVHGYAYWGQGTQVTVSS

SEQ ID NO: 38525 - protein, 113 aa, Artificial Sequence
  Chemically Synthesized
QVQLQESGGGLVQAGGSLRLSCAASGTIFITYLMGWYRQAPGKEREFVAAINRGASTNYADSVKGRFTISRDNAKNTVYLQMNSLKPEDTAVYYCAAAGHWYWGQGTQVTVSS

SEQ ID NO: 38526 - protein, 121 aa, Artificial Sequence
  Chemically Synthesized
QVQLQESGGGLVQAGGSLRLSCAASGSISDYVGMGWYRQAPGKEREFVATIDSVLIPYADSVKGRFTISRDNAKNTVYLQMNSLKPEDTAVYYCAADQIVSAIHHPAHTYWGQGTQVTVSS

SEQ ID NO: 38527 - protein, 120 aa, Artificial Sequence
  Chemically Synthesized
QVQLQESGGGLVQAGGSLRLSCAASGTIFVNESMGWYRQAPGKERELVATIDSVVLPYADSVKGRFTISRDNAKNTVYLQMNSLKPEDTAVYYCAAGIGVVYGHARYDYWGQGTQVTVSS

SEQ ID NO: 38528 - protein, 118 aa, Artificial Sequence
  Chemically Synthesized
QVQLQESGGGLVQAGGSLRLSCAASGYISYIGQMGWYRQAPGKERELVASIGSGASTYYADSVKGRFTISRDNAKNTVYLQMNSLKPEDTAVYYCAAQRGEYFFLGYWGQGTQVTVSS

SEQ ID NO: 38529 - protein, 121 aa, Artificial Sequence
  Chemically Synthesized
QVQLQESGGGLVQAGGSLRLSCAASGNISDGYTMGWYRQAPGKEREFVASISSGTTTNYADSVKGRFTISRDNAKNTVYLQMNSLKPEDTAVYYCAAYNINDYVTVDYHYWGQGTQVTVSS

SEQ ID NO: 38530 - protein, 126 aa, Artificial Sequence
  Chemically Synthesized
QVQLQESGGGLVQAGGSLRLSCAASGTIFGSHLMGWYRQAPGKERELVAAIAYGSNTNYADSVKGRFTISRDNAKNTVYLQMNSLKPEDTAVYYCAATYLQHLDLTRYDYYRLAYWGQGTQVTVSS

SEQ ID NO: 38531 - protein, 121 aa, Artificial Sequence
  Chemically Synthesized
QVQLQESGGGLVQAGGSLRLSCAASGYISYYSMGWYRQAPGKEREFVATISFGTNTYYADSVKGRFTISRDNAKNTVYLQMNSLKPEDTAVYYCAATQDYDSGHTSRHLYWGQGTQVTVSS

SEQ ID NO: 38532 - protein, 109 aa, Artificial Sequence
  Chemically Synthesized
QVQLQESGGGLVQAGGSLRLSCAASGTISGGDIMGWYRQAPGKERELVATINLGGIPYADSVKGRFTISRDNAKNTVYLQMNSLKPEDTAVYYCATLYWGQGTQVTVSS

SEQ ID NO: 38533 - protein, 126 aa, Artificial Sequence
  Chemically Synthesized
QVQLQESGGGLVQAGGSLRLSCAASGYIFSRYHMGWYRQAPGKEREFVAAISDGSSTNYADSVKGRFTISRDNAKNTVYLQMNSLKPEDTAVYYCAANFTVPFDDPHAYTQDFYYWGQGTQVTVSS

SEQ ID NO: 38534 - protein, 117 aa, Artificial Sequence
  Chemically Synthesized
QVQLQESGGGLVQAGGSLRLSCAASGYISYYTLMGWYRQAPGKERELVASISQGSSTYYADSVKGRFTISRDNAKNTVYLQMNSLKPEDTAVYYCAVYDNVENSLYWGQGTQVTVSS

SEQ ID NO: 38535 - protein, 118 aa, Artificial Sequence
  Chemically Synthesized
QVQLQESGGGLVQAGGSLRLSCAASGNISFVPSMGWYRQAPGKERELVAAIGVGAITYYADSVKGRFTISRDNAKNTVYLQMNSLKPEDTAVYYCAADDPPYLDFLYWGQGTQVTVSS

SEQ ID NO: 38536 - protein, 118 aa, Artificial Sequence
  Chemically Synthesized
QVQLQESGGGLVQAGGSLRLSCAASGTIFRSSYMGWYRQAPGKEREFVASIDAGGTTNYADSVKGRFTISRDNAKNTVYLQMNSLKPEDTAVYYCAARVPYRGDYFYWGQGTQVTVSS

SEQ ID NO: 38537 - protein, 118 aa, Artificial Sequence
  Chemically Synthesized
QVQLQESGGGLVQAGGSLRLSCAASGSISSVDGMGWYRQAPGKEREFVAAIDYGANTNYADSVKGRFTISRDNAKNTVYLQMNSLKPEDTAVYYCAADIVRSVNLYYWGQGTQVTVSS

SEQ ID NO: 38538 - protein, 122 aa, Artificial Sequence
  Chemically Synthesized
QVQLQESGGGLVQAGGSLRLSCAASGNISGTYYMGWYRQAPGKEREFVASIGPGSTTNYADSVKGRFTISRDNAKNTVYLQMNSLKPEDTAVYYCAVYDDGAYVLFHGHTYWGQGTQVTVSS

SEQ ID NO: 38539 - protein, 118 aa, Artificial Sequence
  Chemically Synthesized
QVQLQESGGGLVQAGGSLRLSCAASGYIFAVQYMGWYRQAPGKEREFVAAITYGAITNYADSVKGRFTISRDNAKNTVYLQMNSLKPEDTAVYYCAVVWRGPYLFGYWGQGTQVTVSS

SEQ ID NO: 38540 - protein, 118 aa, Artificial Sequence
  Chemically Synthesized
QVQLQESGGGLVQAGGSLRLSCAASGYIFVYRYMGWYRQAPGKEREFVAGIAAGTNTYYADSVKGRFTISRDNAKNTVYLQMNSLKPEDTAVYYCAVGYAYLGYYNYWGQGTQVTVSS

SEQ ID NO: 38541 - protein, 122 aa, Artificial Sequence
  Chemically Synthesized
QVQLQESGGGLVQAGGSLRLSCAASGNIFTITNMGWYRQAPGKEREFVATIDDGGTTYYADSVKGRFTISRDNAKNTVYLQMNSLKPEDTAVYYCAVASDVYGSFAVYRPYWGQGTQVTVSS

SEQ ID NO: 38542 - protein, 118 aa, Artificial Sequence
  Chemically Synthesized
QVQLQESGGGLVQAGGSLRLSCAASGYIFGPYWMGWYRQAPGKERELVATITPGTNTYYADSVKGRFTISRDNAKNTVYLQMNSLKPEDTAVYYCAAWGNRWAALSYWGQGTQVTVSS

SEQ ID NO: 38543 - protein, 118 aa, Artificial Sequence
  Chemically Synthesized
QVQLQESGGGLVQAGGSLRLSCAASGSISYYSRMGWYRQAPGKERELVASITYGGITYYADSVKGRFTISRDNAKNTVYLQMNSLKPEDTAVYYCAVAPWLPARHRYWGQGTQVTVSS

SEQ ID NO: 38544 - protein, 118 aa, Artificial Sequence
  Chemically Synthesized
QVQLQESGGGLVQAGGSLRLSCAASGNIFDEDYMGWYRQAPGKERELVASINNGTITYYADSVKGRFTISRDNAKNTVYLQMNSLKPEDTAVYYCAVYLTTWIGLAYWGQGTQVTVSS

SEQ ID NO: 38545 - protein, 118 aa, Artificial Sequence
  Chemically Synthesized
QVQLQESGGGLVQAGGSLRLSCAASGYISASPYMGWYRQAPGKEREFVASIDSGASTNYADSVKGRFTISRDNAKNTVYLQMNSLKPEDTAVYYCAAPRPWYNLFGYWGQGTQVTVSS

SEQ ID NO: 38546 - protein, 124 aa, Artificial Sequence
  Chemically Synthesized
QVQLQESGGGLVQAGGSLRLSCAASGYISQSSMGWYRQAPGKEREFVAGIAAGAITNYADSVKGRFTISRDNAKNTVYLQMNSLKPEDTAVYYCAVGYIYKLGLSSTVICSMYWGQGTQVTVSS

SEQ ID NO: 38547 - protein, 115 aa, Artificial Sequence
  Chemically Synthesized
QVQLQESGGGLVQAGGSLRLSCAASGNISSLYRMGWYRQAPGKERELVAGIGYGASTYYADSVKGRFTISRDNAKNTVYLQMNSLKPEDTAVYYCAAYYWYHYYWGQGTQVTVSS

SEQ ID NO: 38548 - protein, 118 aa, Artificial Sequence
  Chemically Synthesized
QVQLQESGGGLVQAGGSLRLSCAASGNISVYSYMGWYRQAPGKERELVAAITAGTTTNYADSVKGRFTISRDNAKNTVYLQMNSLKPEDTAVYYCAVLGDGNVYLGYWGQGTQVTVSS

SEQ ID NO: 38549 - protein, 114 aa, Artificial Sequence
  Chemically Synthesized
QVQLQESGGGLVQAGGSLRLSCAASGNIFADYIMGWYRQAPGKERELVAGIGVGGTTYYADSVKGRFTISRDNAKNTVYLQMNSLKPEDTAVYYCAARTTVFYWGQGTQVTVSS

SEQ ID NO: 38550 - protein, 122 aa, Artificial Sequence
  Chemically Synthesized
QVQLQESGGGLVQAGGSLRLSCAASGNISPGTYMGWYRQAPGKERELVATIDYGGSTYYADSVKGRFTISRDNAKNTVYLQMNSLKPEDTAVYYCAARGYPREFYGDVLGYWGQGTQVTVSS

SEQ ID NO: 38551 - protein, 117 aa, Artificial Sequence
  Chemically Synthesized
QVQLQESGGGLVQAGGSLRLSCAASGSISAGLYMGWYRQAPGKEREFVAAISGGGNTNYADSVKGRFTISRDNAKNTVYLQMNSLKPEDTAVYYCAVTQSILLLFYWGQGTQVTVSS

SEQ ID NO: 38552 - protein, 114 aa, Artificial Sequence
  Chemically Synthesized
QVQLQESGGGLVQAGGSLRLSCAASGYIFGGWDMGWYRQAPGKERELVAGITDGTSTNYADSVKGRFTISRDNAKNTVYLQMNSLKPEDTAVYYCADSSGIWYWGQGTQVTVSS

SEQ ID NO: 38553 - protein, 118 aa, Artificial Sequence
  Chemically Synthesized
QVQLQESGGGLVQAGGSLRLSCAASGTISPGADMGWYRQAPGKERELVATITRGATTYYADSVKGRFTISRDNAKNTVYLQMNSLKPEDTAVYYCAAGIYPYLSHYYWGQGTQVTVSS

SEQ ID NO: 38554 - protein, 122 aa, Artificial Sequence
  Chemically Synthesized
QVQLQESGGGLVQAGGSLRLSCAASGNIFRFRVMGWYRQAPGKEREFVAAITYGATTYYADSVKGRFTISRDNAKNTVYLQMNSLKPEDTAVYYCAVLGAVIPIRYFPYRYWGQGTQVTVSS

SEQ ID NO: 38555 - protein, 112 aa, Artificial Sequence
  Chemically Synthesized
QVQLQESGGGLVQAGGSLRLSCAASGNIFRLYEMGWYRQAPGKEREFVAGIASVVVPYADSVKGRFTISRDNAKNTVYLQMNSLKPEDTAVYYCAARVTMYWGQGTQVTVSS

SEQ ID NO: 38556 - protein, 117 aa, Artificial Sequence
  Chemically Synthesized
QVQLQESGGGLVQAGGSLRLSCAASGTISGGWYMGWYRQAPGKERELVAGIATGTNTYYADSVKGRFTISRDNAKNTVYLQMNSLKPEDTAVYYCAAREYVGAYLYWGQGTQVTVSS

SEQ ID NO: 38557 - protein, 122 aa, Artificial Sequence
  Chemically Synthesized
QVQLQESGGGLVQAGGSLRLSCAASGNISDVTNMGWYRQAPGKEREFVAAIDYGTSTYYADSVKGRFTISRDNAKNTVYLQMNSLKPEDTAVYYCAVADRNVYLRYVYHNYWGQGTQVTVSS

SEQ ID NO: 38558 - protein, 117 aa, Artificial Sequence
  Chemically Synthesized
QVQLQESGGGLVQAGGSLRLSCAASGISYANTMGWYRQAPGKEREFVAGIDQGTNTYYADSVKGRFTISRDNAKNTVYLQMNSLKPEDTAVYYCAVIVLTYGSLRYWGQGTQVTVSS

SEQ ID NO: 38559 - protein, 126 aa, Artificial Sequence
  Chemically Synthesized
QVQLQESGGGLVQAGGSLRLSCAASGTISYLDGMGWYRQAPGKEREFVATIAWGTSTNYADSVKGRFTISRDNAKNTVYLQMNSLKPEDTAVYYCAVFAYPDTSTTLVFTVTGFYWGQGTQVTVSS

SEQ ID NO: 38560 - protein, 122 aa, Artificial Sequence
  Chemically Synthesized
QVQLQESGGGLVQAGGSLRLSCAASGYIFIRGRMGWYRQAPGKERELVASIAYGTNTNYADSVKGRFTISRDNAKNTVYLQMNSLKPEDTAVYYCAVTPSAPYAYIRGHVYWGQGTQVTVSS

SEQ ID NO: 38561 - protein, 118 aa, Artificial Sequence
  Chemically Synthesized
QVQLQESGGGLVQAGGSLRLSCAASGYISPGVYMGWYRQAPGKERELVASIDVGANTKYADSVKGRFTISRDNAKNTVYLQMNSLKPEDTAVYYCAATATQYGYHYYWGQGTQVTVSS

SEQ ID NO: 38562 - protein, 117 aa, Artificial Sequence
  Chemically Synthesized
QVQLQESGGGLVQAGGSLRLSCAASGNISPYPYMGWYRQAPGKERELVAAISGGTTYYADSVKGRFTISRDNAKNTVYLQMNSLKPEDTAVYYCAARTYFGRDFYYWGQGTQVTVSS

SEQ ID NO: 38563 - protein, 117 aa, Artificial Sequence
  Chemically Synthesized
QVQLQESGGGLVQAGGSLRLSCAASGNIFYYAMGWYRQAPGKERELVATIATGSTTYYADSVKGRFTISRDNAKNTVYLQMNSLKPEDTAVYYCAAYGPAYTYLLYWGQGTQVTVSS

SEQ ID NO: 38564 - protein, 122 aa, Artificial Sequence
  Chemically Synthesized
QVQLQESGGGLVQAGGSLRLSCAASGSIFGLVEMGWYRQAPGKERELVATIANGSTTYYADSVKGRFTISRDNAKNTVYLQMNSLKPEDTAVYYCAVYIKWQDIQAWKHKYWGQGTQVTVSS

SEQ ID NO: 38565 - protein, 121 aa, Artificial Sequence
  Chemically Synthesized
QVQLQESGGGLVQAGGSLRLSCAASGYIFRILPMGWYRQAPGKERELVAGITGGTTNYADSVKGRFTISRDNAKNTVYLQMNSLKPEDTAVYYCAAYDLSYDDYDPVHYYWGQGTQVTVSS

SEQ ID NO: 38566 - protein, 109 aa, Artificial Sequence
  Chemically Synthesized
QVQLQESGGGLVQAGGSLRLSCAASGTISDVSMGWYRQAPGKEREFVATIALGSTTYYADSVKGRFTISRDNAKNTVYLQMNSLKPEDTAVYYCAYTYWGQGTQVTVSS

SEQ ID NO: 38567 - protein, 115 aa, Artificial Sequence
  Chemically Synthesized
QVQLQESGGGLVQAGGSLRLSCAASGTIYKMGWYRQAPGKERELVAAIAGGGNTYYADSVKGRFTISRDNAKNTVYLQMNSLKPEDTAVYYCAALGSAPRWHAYWGQGTQVTVSS

SEQ ID NO: 38568 - protein, 122 aa, Artificial Sequence
  Chemically Synthesized
QVQLQESGGGLVQAGGSLRLSCAASGSISRLYIMGWYRQAPGKEREFVAGIDGGATTNYADSVKGRFTISRDNAKNTVYLQMNSLKPEDTAVYYCAVSLWAIAWLADRYQYWGQGTQVTVSS

SEQ ID NO: 38569 - protein, 118 aa, Artificial Sequence
  Chemically Synthesized
QVQLQESGGGLVQAGGSLRLSCAASGSIFADYVMGWYRQAPGKEREFVAAITIGGNTNYADSVKGRFTISRDNAKNTVYLQMNSLKPEDTAVYYCAVYLYYIDGLGYWGQGTQVTVSS

SEQ ID NO: 38570 - protein, 123 aa, Artificial Sequence
  Chemically Synthesized
QVQLQESGGGLVQAGGSLRLSCAASGSISLEYYMGWYRQAPGKERELVAAIGRGTYADSVKGRFTISRDNAKNTVYLQMNSLKPEDTAVYYCAAVAQSPEYLQGDDDDDLPYWGQGTQVTVSS

SEQ ID NO: 38571 - protein, 122 aa, Artificial Sequence
  Chemically Synthesized
QVQLQESGGGLVQAGGSLRLSCAASGTISQLVGMGWYRQAPGKERELVAAIGRGASTNYADSVKGRFTISRDNAKNTVYLQMNSLKPEDTAVYYCAVSTYDTAYVTLGYIYWGQGTQVTVSS

SEQ ID NO: 38572 - protein, 122 aa, Artificial Sequence
  Chemically Synthesized
QVQLQESGGGLVQAGGSLRLSCAASGSIFYYPYMGWYRQAPGKERELVASITLGASTYYADSVKGRFTISRDNAKNTVYLQMNSLKPEDTAVYYCAAKYTLYAYDLLYLVYWGQGTQVTVSS

SEQ ID NO: 38573 - protein, 122 aa, Artificial Sequence
  Chemically Synthesized
QVQLQESGGGLVQAGGSLRLSCAASGYIFRYYYMGWYRQAPGKERELVAAIAHGTSTNYADSVKGRFTISRDNAKNTVYLQMNSLKPEDTAVYYCAAASFSPTGDYGDFYYWGQGTQVTVSS

SEQ ID NO: 38574 - protein, 114 aa, Artificial Sequence
  Chemically Synthesized
QVQLQESGGGLVQAGGSLRLSCAASGTISDYGYMGWYRQAPGKEREFVAAISLGATTYYADSVKGRFTISRDNAKNTVYLQMNSLKPEDTAVYYCAAAYSCFYWGQGTQVTVSS

SEQ ID NO: 38575 - protein, 118 aa, Artificial Sequence
  Chemically Synthesized
QVQLQESGGGLVQAGGSLRLSCAASGNISGELVMGWYRQAPGKERELVASIDWGASTYYADSVKGRFTISRDNAKNTVYLQMNSLKPEDTAVYYCAVVIRAEQAYYYWGQGTQVTVSS

SEQ ID NO: 38576 - protein, 121 aa, Artificial Sequence
  Chemically Synthesized
QVQLQESGGGLVQAGGSLRLSCAASGSISSGSMGWYRQAPGKERELVASIDDGATTNYADSVKGRFTISRDNAKNTVYLQMNSLKPEDTAVYYCAVIWYPGLYNDYYHFYWGQGTQVTVSS

SEQ ID NO: 38577 - protein, 118 aa, Artificial Sequence
  Chemically Synthesized
QVQLQESGGGLVQAGGSLRLSCAASGNIFDTEAMGWYRQAPGKEREFVAGIDYGGSTNYADSVKGRFTISRDNAKNTVYLQMNSLKPEDTAVYYCAARDDSIVGHSYWGQGTQVTVSS

SEQ ID NO: 38578 - protein, 122 aa, Artificial Sequence
  Chemically Synthesized
QVQLQESGGGLVQAGGSLRLSCAASGNIFNAWLMGWYRQAPGKEREFVAAITDGSSTYYADSVKGRFTISRDNAKNTVYLQMNSLKPEDTAVYYCAVDVYDRGDFEYLYSYWGQGTQVTVSS

SEQ ID NO: 38579 - protein, 118 aa, Artificial Sequence
  Chemically Synthesized
QVQLQESGGGLVQAGGSLRLSCAASGYISGSARMGWYRQAPGKEREFVASITIGGTTNYADSVKGRFTISRDNAKNTVYLQMNSLKPEDTAVYYCAALVAEVDYYLYWGQGTQVTVSS

SEQ ID NO: 38580 - protein, 126 aa, Artificial Sequence
  Chemically Synthesized
QVQLQESGGGLVQAGGSLRLSCAASGNISDPYMGWYRQAPGKEREFVASIGLGTTTYYADSVKGRFTISRDNAKNTVYLQMNSLKPEDTAVYYCAAGDSDYDDWNYRLLLGSFSYWGQGTQVTVSS

SEQ ID NO: 38581 - protein, 118 aa, Artificial Sequence
  Chemically Synthesized
QVQLQESGGGLVQAGGSLRLSCAASGNIFQPYIMGWYRQAPGKERELVAAINNGASTYYADSVKGRFTISRDNAKNTVYLQMNSLKPEDTAVYYCAARSAADYYFGYWGQGTQVTVSS

SEQ ID NO: 38582 - protein, 117 aa, Artificial Sequence
  Chemically Synthesized
QVQLQESGGGLVQAGGSLRLSCAASGTISYRQDMGWYRQAPGKERELVATISVGTNTYYADSVKGRFTISRDNAKNTVYLQMNSLKPEDTAVYYCAVLRTTLRVMYWGQGTQVTVSS

SEQ ID NO: 38583 - protein, 113 aa, Artificial Sequence
  Chemically Synthesized
QVQLQESGGGLVQAGGSLRLSCAASGNIFATSMGWYRQAPGKERELVAGIADGSITNYADSVKGRFTISRDNAKNTVYLQMNSLKPEDTAVYYCAVITDLPYWGQGTQVTVSS

SEQ ID NO: 38584 - protein, 121 aa, Artificial Sequence
  Chemically Synthesized
QVQLQESGGGLVQAGGSLRLSCAASGSILTMTMGWYRQAPGKERELVAAIGNGGNTYYADSVKGRFTISRDNAKNTVYLQMNSLKPEDTAVYYCAAGDPVKSTPREQFAYWGQGTQVTVSS

SEQ ID NO: 38585 - protein, 117 aa, Artificial Sequence
  Chemically Synthesized
QVQLQESGGGLVQAGGSLRLSCAASGTIFYDTPMGWYRQAPGKERELVAGIGRGGSTYYADSVKGRFTISRDNAKNTVYLQMNSLKPEDTAVYYCAAWREYGRYLYWGQGTQVTVSS

SEQ ID NO: 38586 - protein, 118 aa, Artificial Sequence
  Chemically Synthesized
QVQLQESGGGLVQAGGSLRLSCAASGYISWVGSMGWYRQAPGKEREFVAAIAAGGITYYADSVKGRFTISRDNAKNTVYLQMNSLKPEDTAVYYCAVIILYNTYFGYWGQGTQVTVSS

SEQ ID NO: 38587 - protein, 111 aa, Artificial Sequence
  Chemically Synthesized
QVQLQESGGGLVQAGGSLRLSCAASGYISAQTNMGWYRQAPGKEREFVAAIGDGSNTNYADSVKGRFTISRDNAKNTVYLQMNSLKPEDTAVYYCAGLSYWGQGTQVTVSS

SEQ ID NO: 38588 - protein, 118 aa, Artificial Sequence
  Chemically Synthesized
QVQLQESGGGLVQAGGSLRLSCAASGTISYTWDMGWYRQAPGKEREFVATINYGSITYYADSVKGRFTISRDNAKNTVYLQMNSLKPEDTAVYYCAVYEYLDGPLHYWGQGTQVTVSS

SEQ ID NO: 38589 - protein, 118 aa, Artificial Sequence
  Chemically Synthesized
QVQLQESGGGLVQAGGSLRLSCAASGYISDGGIMGWYRQAPGKERELVASITFGSTTYYADSVKGRFTISRDNAKNTVYLQMNSLKPEDTAVYYCAVTLTVSLLTIYWGQGTQVTVSS

SEQ ID NO: 38590 - protein, 122 aa, Artificial Sequence
  Chemically Synthesized
QVQLQESGGGLVQAGGSLRLSCAASGNISWRWVMGWYRQAPGKEREFVAAIGEGASTNYADSVKGRFTISRDNAKNTVYLQMNSLKPEDTAVYYCAVWTYSAVLLSSKHGYWGQGTQVTVSS

SEQ ID NO: 38591 - protein, 110 aa, Artificial Sequence
  Chemically Synthesized
QVQLQESGGGLVQAGGSLRLSCAASGTIFQYRDMGWYRQAPGKEREFVAGISDGTITNYADSVKGRFTISRDNAKNTVYLQMNSLKPEDTAVYYCAVMYWGQGTQVTVSS

SEQ ID NO: 38592 - protein, 118 aa, Artificial Sequence
  Chemically Synthesized
QVQLQESGGGLVQAGGSLRLSCAASGNISTVRDMGWYRQAPGKEREFVAGIDGGSITYYADSVKGRFTISRDNAKNTVYLQMNSLKPEDTAVYYCAARETDDQRHRYWGQGTQVTVSS

SEQ ID NO: 38593 - protein, 121 aa, Artificial Sequence
  Chemically Synthesized
QVQLQESGGGLVQAGGSLRLSCAASGNISSDLPMGWYRQAPGKERELVALLVTVLIPYADSVKGRFTISRDNAKNTVYLQMNSLKPEDTAVYYCAVLKSEAGGYVSVHGYWGQGTQVTVSS

SEQ ID NO: 38594 - protein, 122 aa, Artificial Sequence
  Chemically Synthesized
QVQLQESGGGLVQAGGSLRLSCAASGNISVRNLMGWYRQAPGKEREFVAGIGFGTTTYYADSVKGRFTISRDNAKNTVYLQMNSLKPEDTAVYYCAAAYYTRHFDAFRHVYWGQGTQVTVSS

SEQ ID NO: 38595 - protein, 122 aa, Artificial Sequence
  Chemically Synthesized
QVQLQESGGGLVQAGGSLRLSCAASGNISVDVAMGWYRQAPGKEREFVAGIAYGTTTNYADSVKGRFTISRDNAKNTVYLQMNSLKPEDTAVYYCAVKSDANWDVGWVFAYWGQGTQVTVSS

SEQ ID NO: 38596 - protein, 116 aa, Artificial Sequence
  Chemically Synthesized
QVQLQESGGGLVQAGGSLRLSCAASGYIFAYATMGWYRQAPGKEREFVASIGVGGSTNYADSVKGRFTISRDNAKNTVYLQMNSLKPEDTAVYYCAVDDPDYLYYWGQGTQVTVSS

SEQ ID NO: 38597 - protein, 118 aa, Artificial Sequence
  Chemically Synthesized
QVQLQESGGGLVQAGGSLRLSCAASGYIFQRDYMGWYRQAPGKERELVATIGQGTNTYYADSVKGRFTISRDNAKNTVYLQMNSLKPEDTAVYYCAAGYYGTSPLDYWGQGTQVTVSS

SEQ ID NO: 38598 - protein, 122 aa, Artificial Sequence
  Chemically Synthesized
QVQLQESGGGLVQAGGSLRLSCAASGYISTSGEMGWYRQAPGKERELVAGIAGGASTNYADSVKGRFTISRDNAKNTVYLQMNSLKPEDTAVYYCAVGYLWLADDITQLKYWGQGTQVTVSS

SEQ ID NO: 38599 - protein, 118 aa, Artificial Sequence
  Chemically Synthesized
QVQLQESGGGLVQAGGSLRLSCAASGSIFPYPSMGWYRQAPGKEREFVATIGDGGNTYYADSVKGRFTISRDNAKNTVYLQMNSLKPEDTAVYYCAAYDVDYYAFAYWGQGTQVTVSS

SEQ ID NO: 38600 - protein, 121 aa, Artificial Sequence
  Chemically Synthesized
QVQLQESGGGLVQAGGSLRLSCAASGTIFPVLYMGWYRQAPGKEREFVASIGQGGNTNYADSVKGRFTISRDNAKNTVYLQMNSLKPEDTAVYYCAVLYVRDDYEFLYAYWGQGTQVTVSS

SEQ ID NO: 38601 - protein, 122 aa, Artificial Sequence
  Chemically Synthesized
QVQLQESGGGLVQAGGSLRLSCAASGSIFLWYSMGWYRQAPGKEREFVAAIDLGGTTYYADSVKGRFTISRDNAKNTVYLQMNSLKPEDTAVYYCAAGTEDDSLIDYNFLYWGQGTQVTVSS

SEQ ID NO: 38602 - protein, 122 aa, Artificial Sequence
  Chemically Synthesized
QVQLQESGGGLVQAGGSLRLSCAASGNISDTAGMGWYRQAPGKEREFVAAIAFGSTTKYADSVKGRFTISRDNAKNTVYLQMNSLKPEDTAVYYCAVRISYVYVSSYWYWYWGQGTQVTVSS

SEQ ID NO: 38603 - protein, 118 aa, Artificial Sequence
  Chemically Synthesized
QVQLQESGGGLVQAGGSLRLSCAASGTIFNGNAMGWYRQAPGKERELVPYADSVKGRFTISRDNAKNTVYLQMNSLKPEDTAVYYCAVGSNDYSAYYNDTPDVVHVYWGQGTQVTVSS

SEQ ID NO: 38604 - protein, 117 aa, Artificial Sequence
  Chemically Synthesized
QVQLQESGGGLVQAGGSLRLSCAASGTIFSTVMGWYRQAPGKERELVAAITTGTSTNYADSVKGRFTISRDNAKNTVYLQMNSLKPEDTAVYYCAVDSYIGVPFYYWGQGTQVTVSS

SEQ ID NO: 38605 - protein, 124 aa, Artificial Sequence
  Chemically Synthesized
QVQLQESGGGLVQAGGSLRLSCAASGTISYYYHMGWYRQAPGKEREFVAAIAEGTSTYYADSVKGRFTISRDNAKNTVYLQMNSLKPEDTAVYYCAAPFYRLESVYGGVHHQYWGQGTQVTVSS

SEQ ID NO: 38606 - protein, 117 aa, Artificial Sequence
  Chemically Synthesized
QVQLQESGGGLVQAGGSLRLSCAASGTISSNWMGWYRQAPGKEREFVAAISLGASTNYADSVKGRFTISRDNAKNTVYLQMNSLKPEDTAVYYCAALSFTHYYHVYWGQGTQVTVSS

SEQ ID NO: 38607 - protein, 126 aa, Artificial Sequence
  Chemically Synthesized
QVQLQESGGGLVQAGGSLRLSCAASGSISAGGEMGWYRQAPGKEREFVATISNGGNTNYADSVKGRFTISRDNAKNTVYLQMNSLKPEDTAVYYCAVGKYYDRQLDYYDYSRYDYWGQGTQVTVSS

SEQ ID NO: 38608 - protein, 122 aa, Artificial Sequence
  Chemically Synthesized
QVQLQESGGGLVQAGGSLRLSCAASGYISWDQGMGWYRQAPGKERELVASIGYGTSTNYADSVKGRFTISRDNAKNTVYLQMNSLKPEDTAVYYCAANGSQNRDDDREHAYWGQGTQVTVSS

SEQ ID NO: 38609 - protein, 121 aa, Artificial Sequence
  Chemically Synthesized
QVQLQESGGGLVQAGGSLRLSCAASGSISSNYTMGWYRQAPGKERELVASINHGAITYYADSVKGRFTISRDNAKNTVYLQMNSLKPEDTAVYYCAALVLEDRYTLMTMYWGQGTQVTVSS

SEQ ID NO: 38610 - protein, 120 aa, Artificial Sequence
  Chemically Synthesized
QVQLQESGGGLVQAGGSLRLSCAASGTIFDNGYMGWYRQAPGKERELVAGIGPGGTTNYADSVKGRFTISRDNAKNTVYLQMNSLKPEDTAVYYCAALGTDNSLSCVMYWGQGTQVTVSS

SEQ ID NO: 38611 - protein, 120 aa, Artificial Sequence
  Chemically Synthesized
QVQLQESGGGLVQAGGSLRLSCAASGYISDGRGMGWYRQAPGKERELVASINSVLIPYADSVKGRFTISRDNAKNTVYLQMNSLKPEDTAVYYCAAPSRRLTTTLVSIYWGQGTQVTVSS

SEQ ID NO: 38612 - protein, 122 aa, Artificial Sequence
  Chemically Synthesized
QVQLQESGGGLVQAGGSLRLSCAASGTIFYYGKMGWYRQAPGKERELVASIGDGASTYYADSVKGRFTISRDNAKNTVYLQMNSLKPEDTAVYYCAAGFDQSRYDTEYLVYWGQGTQVTVSS

SEQ ID NO: 38613 - protein, 126 aa, Artificial Sequence
  Chemically Synthesized
QVQLQESGGGLVQAGGSLRLSCAASGSIFYRIVMGWYRQAPGKERELVASITPGGITNYADSVKGRFTISRDNAKNTVYLQMNSLKPEDTAVYYCAAYDHTDYNYVSDWSVNFTYWGQGTQVTVSS

SEQ ID NO: 38614 - protein, 122 aa, Artificial Sequence
  Chemically Synthesized
QVQLQESGGGLVQAGGSLRLSCAASGSISTYDGMGWYRQAPGKERELVATINVGANTYYADSVKGRFTISRDNAKNTVYLQMNSLKPEDTAVYYCAAAIYEPAPTFIYYLYWGQGTQVTVSS

SEQ ID NO: 38615 - protein, 117 aa, Artificial Sequence
  Chemically Synthesized
QVQLQESGGGLVQAGGSLRLSCAASGNISGDQGMGWYRQAPGKEREFVAGISSVLLPYADSVKGRFTISRDNAKNTVYLQMNSLKPEDTAVYYCAVTALADISLGYWGQGTQVTVSS

SEQ ID NO: 38616 - protein, 122 aa, Artificial Sequence
  Chemically Synthesized
QVQLQESGGGLVQAGGSLRLSCAASGNIFGWQGMGWYRQAPGKERELVAAIGAGSNTYYADSVKGRFTISRDNAKNTVYLQMNSLKPEDTAVYYCAAAYPVPFWVPRPFAYWGQGTQVTVSS

SEQ ID NO: 38617 - protein, 118 aa, Artificial Sequence
  Chemically Synthesized
QVQLQESGGGLVQAGGSLRLSCAASGSIFPSPYMGWYRQAPGKERELVASISAGSITYYADSVKGRFTISRDNAKNTVYLQMNSLKPEDTAVYYCAVGRYDDVTHDYWGQGTQVTVSS

SEQ ID NO: 38618 - protein, 118 aa, Artificial Sequence
  Chemically Synthesized
QVQLQESGGGLVQAGGSLRLSCAASGTISYPDVMGWYRQAPGKEREFVATIADGATTNYADSVKGRFTISRDNAKNTVYLQMNSLKPEDTAVYYCAVPLDYYPNHTYWGQGTQVTVSS

SEQ ID NO: 38619 - protein, 122 aa, Artificial Sequence
  Chemically Synthesized
QVQLQESGGGLVQAGGSLRLSCAASGTIFYVYDMGWYRQAPGKEREFVASISRGANTNYADSVKGRFTISRDNAKNTVYLQMNSLKPEDTAVYYCAAYWIYPVVLGWPFDYWGQGTQVTVSS

SEQ ID NO: 38620 - protein, 122 aa, Artificial Sequence
  Chemically Synthesized
QVQLQESGGGLVQAGGSLRLSCAASGTISPTISMGWYRQAPGKEREFVASISHGGSTYYADSVKGRFTISRDNAKNTVYLQMNSLKPEDTAVYYCAVWRTLQGGYDSGHYYWGQGTQVTVSS

SEQ ID NO: 38621 - protein, 118 aa, Artificial Sequence
  Chemically Synthesized
QVQLQESGGGLVQAGGSLRLSCAASGTIFLEPSMGWYRQAPGKEREFVAAIDSGGSTNYADSVKGRFTISRDNAKNTVYLQMNSLKPEDTAVYYCAVNLYNRYDHYYWGQGTQVTVSS

SEQ ID NO: 38622 - protein, 121 aa, Artificial Sequence
  Chemically Synthesized
QVQLQESGGGLVQAGGSLRLSCAASGTISYSRRMGWYRQAPGKERELVASLILVVVPYADSVKGRFTISRDNAKNTVYLQMNSLKPEDTAVYYCAADAFKYWWEYETYRYWGQGTQVTVSS

SEQ ID NO: 38623 - protein, 121 aa, Artificial Sequence
  Chemically Synthesized
QVQLQESGGGLVQAGGSLRLSCAASGTISVGWEMGWYRQAPGKERELVASIDYGSSTNYADSVKGRFTISRDNAKNTVYLQMNSLKPEDTAVYYCAVDTWSSSILSNTFYWGQGTQVTVSS

SEQ ID NO: 38624 - protein, 112 aa, Artificial Sequence
  Chemically Synthesized
QVQLQESGGGLVQAGGSLRLSCAASGNISQTSTMGWYRQAPGKEREFVAAISFGGSTYYADSVKGRFTISRDNAKNTVYLQMNSLKPEDTAVYYCAAGGMYWGQGTQVTVSS

SEQ ID NO: 38625 - protein, 120 aa, Artificial Sequence
  Chemically Synthesized
QVQLQESGGGLVQAGGSLRLSCAASGNISYPDYMGWYRQAPGKERELVAAIDPGGNTNYADSVKGRFTISRDNAKNTVYLQMNSLKPEDTAVYYCAADSYALNVFRTLYWGQGTQVTVSS

SEQ ID NO: 38626 - protein, 118 aa, Artificial Sequence
  Chemically Synthesized
QVQLQESGGGLVQAGGSLRLSCAASGSISYSAPMGWYRQAPGKEREFVATIADGTNTYYADSVKGRFTISRDNAKNTVYLQMNSLKPEDTAVYYCAADGRGVQDLQYWGQGTQVTVSS

SEQ ID NO: 38627 - protein, 126 aa, Artificial Sequence
  Chemically Synthesized
QVQLQESGGGLVQAGGSLRLSCAASGTIFVYGYMGWYRQAPGKERELVAAIGYGGTTNYADSVKGRFTISRDNAKNTVYLQMNSLKPEDTAVYYCAVVPRTWFYYYAHFHRPFVYWGQGTQVTVSS

SEQ ID NO: 38628 - protein, 126 aa, Artificial Sequence
  Chemically Synthesized
QVQLQESGGGLVQAGGSLRLSCAASGNISDHYRMGWYRQAPGKEREFVAAIAQGGITNYADSVKGRFTISRDNAKNTVYLQMNSLKPEDTAVYYCAVVAYAYGSQPYYYDYSFGYWGQGTQVTVSS

SEQ ID NO: 38629 - protein, 116 aa, Artificial Sequence
  Chemically Synthesized
QVQLQESGGGLVQAGGSLRLSCAASGNIFYLDTMGWYRQAPGKERELVATIGYGTSTYADSVKGRFTISRDNAKNTVYLQMNSLKPEDTAVYYCAAPDTTSLTIYWGQGTQVTVSS

SEQ ID NO: 38630 - protein, 126 aa, Artificial Sequence
  Chemically Synthesized
QVQLQESGGGLVQAGGSLRLSCAASGNISRFQWMGWYRQAPGKEREFVAGITAGASTNYADSVKGRFTISRDNAKNTVYLQMNSLKPEDTAVYYCAVEYNTTDPWGLDVDSAYWYWGQGTQVTVSS

SEQ ID NO: 38631 - protein, 119 aa, Artificial Sequence
  Chemically Synthesized
QVQLQESGGGLVQAGGSLRLSCAASGNISGYDGMGWYRQAPGKEREFVAGIATGGTTNYADSVKGRFTISRDNAKNTVYLQMNSLKPEDTAVYYCAAWTYGVAFRYEYWGQGTQVTVSS

SEQ ID NO: 38632 - protein, 122 aa, Artificial Sequence
  Chemically Synthesized
QVQLQESGGGLVQAGGSLRLSCAASGYISIWDLMGWYRQAPGKEREFVAGITYGGTTYYADSVKGRFTISRDNAKNTVYLQMNSLKPEDTAVYYCAAYQYPVDGIDRAYWYWGQGTQVTVSS

SEQ ID NO: 38633 - protein, 118 aa, Artificial Sequence
  Chemically Synthesized
QVQLQESGGGLVQAGGSLRLSCAASGNISYLLYMGWYRQAPGKEREFVAGIAYGGNTYYADSVKGRFTISRDNAKNTVYLQMNSLKPEDTAVYYCAAPNTSSLGLVYWGQGTQVTVSS

SEQ ID NO: 38634 - protein, 113 aa, Artificial Sequence
  Chemically Synthesized
QVQLQESGGGLVQAGGSLRLSCAASGYISPVRSMGWYRQAPGKEREFVAGITGGAITYYADSVKGRFTISRDNAKNTVYLQMNSLKPEDTAVYYCAVDTLTYWGQGTQVTVSS

SEQ ID NO: 38635 - protein, 122 aa, Artificial Sequence
  Chemically Synthesized
QVQLQESGGGLVQAGGSLRLSCAASGTIFYEPSMGWYRQAPGKEREFVAGISGGANTNYADSVKGRFTISRDNAKNTVYLQMNSLKPEDTAVYYCAAGYAKSWQQYVVHPYWGQGTQVTVSS

SEQ ID NO: 38636 - protein, 118 aa, Artificial Sequence
  Chemically Synthesized
QVQLQESGGGLVQAGGSLRLSCAASGSISTSGDMGWYRQAPGKERELVAAIAGGGITYYADSVKGRFTISRDNAKNTVYLQMNSLKPEDTAVYYCAVYIGGLRKLSYWGQGTQVTVSS

SEQ ID NO: 38637 - protein, 118 aa, Artificial Sequence
  Chemically Synthesized
QVQLQESGGGLVQAGGSLRLSCAASGTISSLRQMGWYRQAPGKERELVAAIGRGANTNYADSVKGRFTISRDNAKNTVYLQMNSLKPEDTAVYYCAASTSDVPWHDYWGQGTQVTVSS

SEQ ID NO: 38638 - protein, 120 aa, Artificial Sequence
  Chemically Synthesized
QVQLQESGGGLVQAGGSLRLSCAASGSIFTVTMGWYRQAPGKEREFVATIARGSTYYADSVKGRFTISRDNAKNTVYLQMNSLKPEDTAVYYCAVYRYPSPATLYQTIYWGQGTQVTVSS

SEQ ID NO: 38639 - protein, 122 aa, Artificial Sequence
  Chemically Synthesized
QVQLQESGGGLVQAGGSLRLSCAASGTISRDLEMGWYRQAPGKERELVASITFGTNTNYADSVKGRFTISRDNAKNTVYLQMNSLKPEDTAVYYCAVALYYPDSQRDDHYYWGQGTQVTVSS

SEQ ID NO: 38640 - protein, 121 aa, Artificial Sequence
  Chemically Synthesized
QVQLQESGGGLVQAGGSLRLSCAASGSISRDYQMGWYRQAPGKEREFVASIADGGNTNYADSVKGRFTISRDNAKNTVYLQMNSLKPEDTAVYYCAVRSYLATPYSRTMYWGQGTQVTVSS

SEQ ID NO: 38641 - protein, 118 aa, Artificial Sequence
  Chemically Synthesized
QVQLQESGGGLVQAGGSLRLSCAASGYIFYSGAMGWYRQAPGKERELVASIGSGGNTNYADSVKGRFTISRDNAKNTVYLQMNSLKPEDTAVYYCAAYQAVNNDHTYWGQGTQVTVSS

SEQ ID NO: 38642 - protein, 117 aa, Artificial Sequence
  Chemically Synthesized
QVQLQESGGGLVQAGGSLRLSCAASGSIFDAYRMGWYRQAPGKERELVAVLILVVLPYADSVKGRFTISRDNAKNTVYLQMNSLKPEDTAVYYCAAKWDGVYSHDYWGQGTQVTVSS

SEQ ID NO: 38643 - protein, 117 aa, Artificial Sequence
  Chemically Synthesized
QVQLQESGGGLVQAGGSLRLSCAASGSIFDYTYMGWYRQAPGKERELVASIDTGTNTYYADSVKGRFTISRDNAKNTVYLQMNSLKPEDTAVYYCAVYGSLLLLFYWGQGTQVTVSS

SEQ ID NO: 38644 - protein, 122 aa, Artificial Sequence
  Chemically Synthesized
QVQLQESGGGLVQAGGSLRLSCAASGSIFNIYNMGWYRQAPGKEREFVAAINAGGSTYYADSVKGRFTISRDNAKNTVYLQMNSLKPEDTAVYYCAAWDNNDDVYLWYYYYWGQGTQVTVSS

SEQ ID NO: 38645 - protein, 112 aa, Artificial Sequence
  Chemically Synthesized
QVQLQESGGGLVQAGGSLRLSCAASGSISGQGDMGWYRQAPGKERELVAGITVGTSTYYADSVKGRFTISRDNAKNTVYLQMNSLKPEDTAVYYCAVTSFYWGQGTQVTVSS

SEQ ID NO: 38646 - protein, 122 aa, Artificial Sequence
  Chemically Synthesized
QVQLQESGGGLVQAGGSLRLSCAASGTISGYGDMGWYRQAPGKERELVATIADGANTNYADSVKGRFTISRDNAKNTVYLQMNSLKPEDTAVYYCAVDTAYVGRWVYALNYWGQGTQVTVSS

SEQ ID NO: 38647 - protein, 126 aa, Artificial Sequence
  Chemically Synthesized
QVQLQESGGGLVQAGGSLRLSCAASGNISADSYMGWYRQAPGKEREFVATISPGTITNYADSVKGRFTISRDNAKNTVYLQMNSLKPEDTAVYYCAVTNDYLWLDDDIAPPRYAYWGQGTQVTVSS

SEQ ID NO: 38648 - protein, 116 aa, Artificial Sequence
  Chemically Synthesized
QVQLQESGGGLVQAGGSLRLSCAASGTIFPAYMGWYRQAPGKERELVATITGSITNYADSVKGRFTISRDNAKNTVYLQMNSLKPEDTAVYYCAVRFDEFDAHRYWGQGTQVTVSS

SEQ ID NO: 38649 - protein, 118 aa, Artificial Sequence
  Chemically Synthesized
QVQLQESGGGLVQAGGSLRLSCAASGSISTYWEMGWYRQAPGKERELVASIDSGGTTYYADSVKGRFTISRDNAKNTVYLQMNSLKPEDTAVYYCAVDVPWYYYLEYWGQGTQVTVSS

SEQ ID NO: 38650 - protein, 117 aa, Artificial Sequence
  Chemically Synthesized
QVQLQESGGGLVQAGGSLRLSCAASGYIFAELVMGWYRQAPGKEREFVAGITSGGTTNYADSVKGRFTISRDNAKNTVYLQMNSLKPEDTAVYYCAAETGGYSNIYWGQGTQVTVSS

SEQ ID NO: 38651 - protein, 122 aa, Artificial Sequence
  Chemically Synthesized
QVQLQESGGGLVQAGGSLRLSCAASGTISYADYMGWYRQAPGKEREFVASINNGGTTNYADSVKGRFTISRDNAKNTVYLQMNSLKPEDTAVYYCAAGLYRRDLRGYTHGYWGQGTQVTVSS

SEQ ID NO: 38652 - protein, 117 aa, Artificial Sequence
  Chemically Synthesized
QVQLQESGGGLVQAGGSLRLSCAASGTISGGAIMGWYRQAPGKERELVAGIDYGTSTYYADSVKGRFTISRDNAKNTVYLQMNSLKPEDTAVYYCAVRDHALAGIYWGQGTQVTVSS

SEQ ID NO: 38653 - protein, 118 aa, Artificial Sequence
  Chemically Synthesized
QVQLQESGGGLVQAGGSLRLSCAASGTIFRGVTMGWYRQAPGKEREFVAAIDYGTITNYADSVKGRFTISRDNAKNTVYLQMNSLKPEDTAVYYCAVGLYTDYRFDYWGQGTQVTVSS

SEQ ID NO: 38654 - protein, 118 aa, Artificial Sequence
  Chemically Synthesized
QVQLQESGGGLVQAGGSLRLSCAASGNIFARYYMGWYRQAPGKEREFVASIDGGTNTYYADSVKGRFTISRDNAKNTVYLQMNSLKPEDTAVYYCAVDDYHGYGHPYWGQGTQVTVSS

SEQ ID NO: 38655 - protein, 120 aa, Artificial Sequence
  Chemically Synthesized
QVQLQESGGGLVQAGGSLRLSCAASGNIFLGMGWYRQAPGKERELVAAIDVGTSTNYADSVKGRFTISRDNAKNTVYLQMNSLKPEDTAVYYCAVADDLTTDLGNGHVYWGQGTQVTVSS

SEQ ID NO: 38656 - protein, 116 aa, Artificial Sequence
  Chemically Synthesized
QVQLQESGGGLVQAGGSLRLSCAASGYIFYRYDMGWYRQAPGKERELVAAINDGSTTNYADSVKGRFTISRDNAKNTVYLQMNSLKPEDTAVYYCAARDDVLLAYWGQGTQVTVSS

SEQ ID NO: 38657 - protein, 118 aa, Artificial Sequence
  Chemically Synthesized
QVQLQESGGGLVQAGGSLRLSCAASGNIFYGREMGWYRQAPGKERELVATIAYGGITYYADSVKGRFTISRDNAKNTVYLQMNSLKPEDTAVYYCAAWYQSQNRLYYWGQGTQVTVSS

SEQ ID NO: 38658 - protein, 122 aa, Artificial Sequence
  Chemically Synthesized
QVQLQESGGGLVQAGGSLRLSCAASGTISDVYYMGWYRQAPGKERELVAAIGGGTTTYYADSVKGRFTISRDNAKNTVYLQMNSLKPEDTAVYYCAATRYPDNYDLQYYGYWGQGTQVTVSS

SEQ ID NO: 38659 - protein, 113 aa, Artificial Sequence
  Chemically Synthesized
QVQLQESGGGLVQAGGSLRLSCAASGYIFPPPAMGWYRQAPGKERELVASINAGSTTYYADSVKGRFTISRDNAKNTVYLQMNSLKPEDTAVYYCAVGDYSYWGQGTQVTVSS

SEQ ID NO: 38660 - protein, 124 aa, Artificial Sequence
  Chemically Synthesized
QVQLQESGGGLVQAGGSLRLSCAASGTILTVTMGWYRQAPGKEREFVALLVVVVVPYADSVKGRFTISRDNAKNTVYLQMNSLKPEDTAVYYCAVTYRGLDTPFVNSQVDHFYWGQGTQVTVSS

SEQ ID NO: 38661 - protein, 125 aa, Artificial Sequence
  Chemically Synthesized
QVQLQESGGGLVQAGGSLRLSCAASGNIFSDDWMGWYRQAPGKEREFVATIGYGSTTYYADSVKGRFTISRDNAKNTVYLQMNSLKPEDTAVYYCAATDDYNGQDDEGWWSRIYWGQGTQVTVSS

SEQ ID NO: 38662 - protein, 122 aa, Artificial Sequence
  Chemically Synthesized
QVQLQESGGGLVQAGGSLRLSCAASGNIFSGTHMGWYRQAPGKEREFVAGIDYGTTTYYADSVKGRFTISRDNAKNTVYLQMNSLKPEDTAVYYCAAVPDWISQYPRLLGYWGQGTQVTVSS

SEQ ID NO: 38663 - protein, 122 aa, Artificial Sequence
  Chemically Synthesized
QVQLQESGGGLVQAGGSLRLSCAASGYIFTFHLMGWYRQAPGKERELVATITDGSSTNYADSVKGRFTISRDNAKNTVYLQMNSLKPEDTAVYYCAVYPSDLPDDWAGFYYWGQGTQVTVSS

SEQ ID NO: 38664 - protein, 121 aa, Artificial Sequence
  Chemically Synthesized
QVQLQESGGGLVQAGGSLRLSCAASGYISRRARMGWYRQAPGKEREFVASIDYGGNTYYADSVKGRFTISRDNAKNTVYLQMNSLKPEDTAVYYCAAVFYHPYYRRTYGYWGQGTQVTVSS

SEQ ID NO: 38665 - protein, 126 aa, Artificial Sequence
  Chemically Synthesized
QVQLQESGGGLVQAGGSLRLSCAASGTISSSYPMGWYRQAPGKERELVASIDTGGTTNYADSVKGRFTISRDNAKNTVYLQMNSLKPEDTAVYYCAVVAKYFLPDWSYYTFLPLYWGQGTQVTVSS

SEQ ID NO: 38666 - protein, 118 aa, Artificial Sequence
  Chemically Synthesized
QVQLQESGGGLVQAGGSLRLSCAASGNISRIGDMGWYRQAPGKEREFVAAIATGSNTNYADSVKGRFTISRDNAKNTVYLQMNSLKPEDTAVYYCAVTYYTSSYLAYWGQGTQVTVSS

SEQ ID NO: 38667 - protein, 118 aa, Artificial Sequence
  Chemically Synthesized
QVQLQESGGGLVQAGGSLRLSCAASGTIFPIFYMGWYRQAPGKERELVAGITFGGTTYYADSVKGRFTISRDNAKNTVYLQMNSLKPEDTAVYYCAVINRIRYDHTYWGQGTQVTVSS

SEQ ID NO: 38668 - protein, 118 aa, Artificial Sequence
  Chemically Synthesized
QVQLQESGGGLVQAGGSLRLSCAASGNISDGNYMGWYRQAPGKERELVAAIDDGANTNYADSVKGRFTISRDNAKNTVYLQMNSLKPEDTAVYYCAVAYEFGKSHDYWGQGTQVTVSS

SEQ ID NO: 38669 - protein, 122 aa, Artificial Sequence
  Chemically Synthesized
QVQLQESGGGLVQAGGSLRLSCAASGTISVSSYMGWYRQAPGKEREFVATIGSVVLPYADSVKGRFTISRDNAKNTVYLQMNSLKPEDTAVYYCAVVLRVYFQYAQVRYRYWGQGTQVTVSS

SEQ ID NO: 38670 - protein, 122 aa, Artificial Sequence
  Chemically Synthesized
QVQLQESGGGLVQAGGSLRLSCAASGYISVGVVMGWYRQAPGKERELVAAIGPGSNTYYADSVKGRFTISRDNAKNTVYLQMNSLKPEDTAVYYCAVVQQYPTVARLKLEYWGQGTQVTVSS

SEQ ID NO: 38671 - protein, 125 aa, Artificial Sequence
  Chemically Synthesized
QVQLQESGGGLVQAGGSLRLSCAASGTIFVQGSMGWYRQAPGKERELVAAIDEGGIPYADSVKGRFTISRDNAKNTVYLQMNSLKPEDTAVYYCAVHLPAGTTPRVNKDRELVYWGQGTQVTVSS

SEQ ID NO: 38672 - protein, 118 aa, Artificial Sequence
  Chemically Synthesized
QVQLQESGGGLVQAGGSLRLSCAASGYIFVYFIMGWYRQAPGKERELVAGISSGTSTYYADSVKGRFTISRDNAKNTVYLQMNSLKPEDTAVYYCAADKLTSDTLGYWGQGTQVTVSS

SEQ ID NO: 38673 - protein, 118 aa, Artificial Sequence
  Chemically Synthesized
QVQLQESGGGLVQAGGSLRLSCAASGTIFYRSRMGWYRQAPGKERELVASITDGSSTYYADSVKGRFTISRDNAKNTVYLQMNSLKPEDTAVYYCAADSISAQGLYYWGQGTQVTVSS

SEQ ID NO: 38674 - protein, 121 aa, Artificial Sequence
  Chemically Synthesized
QVQLQESGGGLVQAGGSLRLSCAASGYISSDYNMGWYRQAPGKERELVAAIDGGGITNYADSVKGRFTISRDNAKNTVYLQMNSLKPEDTAVYYCAVGDVTTLNVTSLIYWGQGTQVTVSS

SEQ ID NO: 38675 - protein, 118 aa, Artificial Sequence
  Chemically Synthesized
QVQLQESGGGLVQAGGSLRLSCAASGYIFVSHYMGWYRQAPGKEREFVATIDGGTSTNYADSVKGRFTISRDNAKNTVYLQMNSLKPEDTAVYYCAASTQAAGLHEYWGQGTQVTVSS

SEQ ID NO: 38676 - protein, 122 aa, Artificial Sequence
  Chemically Synthesized
QVQLQESGGGLVQAGGSLRLSCAASGSISGTWYMGWYRQAPGKEREFVATITYGTITYYADSVKGRFTISRDNAKNTVYLQMNSLKPEDTAVYYCAAGIYWKTGGDVWHGYWGQGTQVTVSS

SEQ ID NO: 38677 - protein, 122 aa, Artificial Sequence
  Chemically Synthesized
QVQLQESGGGLVQAGGSLRLSCAASGTISSTLYMGWYRQAPGKEREFVAAIGWGSTTYYADSVKGRFTISRDNAKNTVYLQMNSLKPEDTAVYYCAVYGYGRVYLYGLHVYWGQGTQVTVSS

SEQ ID NO: 38678 - protein, 122 aa, Artificial Sequence
  Chemically Synthesized
QVQLQESGGGLVQAGGSLRLSCAASGTISSYYLMGWYRQAPGKEREFVASISAGATTYYADSVKGRFTISRDNAKNTVYLQMNSLKPEDTAVYYCAAQYTADGYYGPYHWYWGQGTQVTVSS

SEQ ID NO: 38679 - protein, 118 aa, Artificial Sequence
  Chemically Synthesized
QVQLQESGGGLVQAGGSLRLSCAASGSISPVLEMGWYRQAPGKEREFVATITHGATTNYADSVKGRFTISRDNAKNTVYLQMNSLKPEDTAVYYCAVTTRYAIGYAYWGQGTQVTVSS

SEQ ID NO: 38680 - protein, 122 aa, Artificial Sequence
  Chemically Synthesized
QVQLQESGGGLVQAGGSLRLSCAASGSIFAVDNMGWYRQAPGKEREFVAGISYGGITYYADSVKGRFTISRDNAKNTVYLQMNSLKPEDTAVYYCAVADDYGPYYGARFGYWGQGTQVTVSS

SEQ ID NO: 38681 - protein, 115 aa, Artificial Sequence
  Chemically Synthesized
QVQLQESGGGLVQAGGSLRLSCAASGYIFAANYMGWYRQAPGKEREFVAAIDYGATTYYADSVKGRFTISRDNAKNTVYLQMNSLKPEDTAVYYCAARYYRLRYWGQGTQVTVSS

SEQ ID NO: 38682 - protein, 118 aa, Artificial Sequence
  Chemically Synthesized
QVQLQESGGGLVQAGGSLRLSCAASGSISVRYSMGWYRQAPGKERELVAGINRGATTNYADSVKGRFTISRDNAKNTVYLQMNSLKPEDTAVYYCAADRSGQIFHPYWGQGTQVTVSS

SEQ ID NO: 38683 - protein, 126 aa, Artificial Sequence
  Chemically Synthesized
QVQLQESGGGLVQAGGSLRLSCAASGTISYVLSMGWYRQAPGKERELVATIAVGGTTNYADSVKGRFTISRDNAKNTVYLQMNSLKPEDTAVYYCAAWRYRTYYDWSVFYGYYPYWGQGTQVTVSS

SEQ ID NO: 38684 - protein, 118 aa, Artificial Sequence
  Chemically Synthesized
QVQLQESGGGLVQAGGSLRLSCAASGYISYANAMGWYRQAPGKEREFVAAISSGGTTNYADSVKGRFTISRDNAKNTVYLQMNSLKPEDTAVYYCAVPSEADDTYVYWGQGTQVTVSS

SEQ ID NO: 38685 - protein, 117 aa, Artificial Sequence
  Chemically Synthesized
QVQLQESGGGLVQAGGSLRLSCAASGSISAPYQMGWYRQAPGKERELVATITTVVIPYADSVKGRFTISRDNAKNTVYLQMNSLKPEDTAVYYCAVYYGYGGAHHYWGQGTQVTVSS

SEQ ID NO: 38686 - protein, 117 aa, Artificial Sequence
  Chemically Synthesized
QVQLQESGGGLVQAGGSLRLSCAASGTISAHYNMGWYRQAPGKERELVAGISYGASTYYADSVKGRFTISRDNAKNTVYLQMNSLKPEDTAVYYCAAGTASSTFIYWGQGTQVTVSS

SEQ ID NO: 38687 - protein, 122 aa, Artificial Sequence
  Chemically Synthesized
QVQLQESGGGLVQAGGSLRLSCAASGNIFQYHRMGWYRQAPGKEREFVAAIGRGGNTNYADSVKGRFTISRDNAKNTVYLQMNSLKPEDTAVYYCAAYWYYYYGLIYYYVYWGQGTQVTVSS

SEQ ID NO: 38688 - protein, 117 aa, Artificial Sequence
  Chemically Synthesized
QVQLQESGGGLVQAGGSLRLSCAASGSIFRRRQMGWYRQAPGKEREFVATIGTGSTYYADSVKGRFTISRDNAKNTVYLQMNSLKPEDTAVYYCAAQFPAGWGFYYWGQGTQVTVSS

SEQ ID NO: 38689 - protein, 125 aa, Artificial Sequence
  Chemically Synthesized
QVQLQESGGGLVQAGGSLRLSCAASGTISWLTDMGWYRQAPGKERELVAGINVGGTTNYADSVKGRFTISRDNAKNTVYLQMNSLKPEDTAVYYCAAHFYVGQEYSQVPYDYLYWGQGTQVTVSS

SEQ ID NO: 38690 - protein, 116 aa, Artificial Sequence
  Chemically Synthesized
QVQLQESGGGLVQAGGSLRLSCAASGSIFYPYMGWYRQAPGKERELVATISDGASTNYADSVKGRFTISRDNAKNTVYLQMNSLKPEDTAVYYCAASLNTVLSIYWGQGTQVTVSS

SEQ ID NO: 38691 - protein, 121 aa, Artificial Sequence
  Chemically Synthesized
QVQLQESGGGLVQAGGSLRLSCAASGSIFSDIYMGWYRQAPGKERELVAGINYGSTTNYADSVKGRFTISRDNAKNTVYLQMNSLKPEDTAVYYCAAFGYGAGSATSLIYWGQGTQVTVSS

SEQ ID NO: 38692 - protein, 124 aa, Artificial Sequence
  Chemically Synthesized
QVQLQESGGGLVQAGGSLRLSCAASGSISPSIAMGWYRQAPGKERELVASIAKGANTYYADSVKGRFTISRDNAKNTVYLQMNSLKPEDTAVYYCAASTTTKSWLYVYLYHRYWGQGTQVTVSS

SEQ ID NO: 38693 - protein, 117 aa, Artificial Sequence
  Chemically Synthesized
QVQLQESGGGLVQAGGSLRLSCAASGYIFGADLMGWYRQAPGKEREFVAAIAWGANTYYADSVKGRFTISRDNAKNTVYLQMNSLKPEDTAVYYCAANDLEGQHQYWGQGTQVTVSS

SEQ ID NO: 38694 - protein, 117 aa, Artificial Sequence
  Chemically Synthesized
QVQLQESGGGLVQAGGSLRLSCAASGLFLRLGMGWYRQAPGKERELVAGIGGGTTTNYADSVKGRFTISRDNAKNTVYLQMNSLKPEDTAVYYCAAHYLRHDYHSYWGQGTQVTVSS

SEQ ID NO: 38695 - protein, 116 aa, Artificial Sequence
  Chemically Synthesized
QVQLQESGGGLVQAGGSLRLSCAASGYIFYFVRMGWYRQAPGKEREFVAGIAYGSNTNYADSVKGRFTISRDNAKNTVYLQMNSLKPEDTAVYYCAARTVRKHWYWGQGTQVTVSS

SEQ ID NO: 38696 - protein, 118 aa, Artificial Sequence
  Chemically Synthesized
QVQLQESGGGLVQAGGSLRLSCAASGSISESYDMGWYRQAPGKEREFVAAIATGATTNYADSVKGRFTISRDNAKNTVYLQMNSLKPEDTAVYYCAVVTSYSNPFGYWGQGTQVTVSS

SEQ ID NO: 38697 - protein, 126 aa, Artificial Sequence
  Chemically Synthesized
QVQLQESGGGLVQAGGSLRLSCAASGNISKTASMGWYRQAPGKEREFVATIAGGSTTYYADSVKGRFTISRDNAKNTVYLQMNSLKPEDTAVYYCAATGPGTTTGYYTRLYDHDYWGQGTQVTVSS

SEQ ID NO: 38698 - protein, 122 aa, Artificial Sequence
  Chemically Synthesized
QVQLQESGGGLVQAGGSLRLSCAASGSISRAFFMGWYRQAPGKERELVASIDGGGNTYYADSVKGRFTISRDNAKNTVYLQMNSLKPEDTAVYYCAATDWYGSDAGSRFYYWGQGTQVTVSS

SEQ ID NO: 38699 - protein, 109 aa, Artificial Sequence
  Chemically Synthesized
QVQLQESGGGLVQAGGSLRLSCAASGTISVVIMGWYRQAPGKEREFVASIGFGSSTYYADSVKGRFTISRDNAKNTVYLQMNSLKPEDTAVYYCAHVYWGQGTQVTVSS

SEQ ID NO: 38700 - protein, 118 aa, Artificial Sequence
  Chemically Synthesized
QVQLQESGGGLVQAGGSLRLSCAASGSISVFGDMGWYRQAPGKERELVASITYGGITYYADSVKGRFTISRDNAKNTVYLQMNSLKPEDTAVYYCAVWYLDYVAFAYWGQGTQVTVSS

SEQ ID NO: 38701 - protein, 120 aa, Artificial Sequence
  Chemically Synthesized
QVQLQESGGGLVQAGGSLRLSCAASGYMGWYRQAPGKERELVASIGLGSNTNYADSVKGRFTISRDNAKNTVYLQMNSLKPEDTAVYYCAAIRIPTGVGGEYRYVDYDYWGQGTQVTVSS

SEQ ID NO: 38702 - protein, 118 aa, Artificial Sequence
  Chemically Synthesized
QVQLQESGGGLVQAGGSLRLSCAASGSISGDYIMGWYRQAPGKERELVATIGQGSSTYYADSVKGRFTISRDNAKNTVYLQMNSLKPEDTAVYYCAVDYYTIPTFFYWGQGTQVTVSS

SEQ ID NO: 38703 - protein, 114 aa, Artificial Sequence
  Chemically Synthesized
QVQLQESGGGLVQAGGSLRLSCAASGTIFSQYMGWYRQAPGKERELVATISDGGNTNYADSVKGRFTISRDNAKNTVYLQMNSLKPEDTAVYYCAVSTITRFYWGQGTQVTVSS

SEQ ID NO: 38704 - protein, 118 aa, Artificial Sequence
  Chemically Synthesized
QVQLQESGGGLVQAGGSLRLSCAASGTISSGYSMGWYRQAPGKERELVAAITAGTITYYADSVKGRFTISRDNAKNTVYLQMNSLKPEDTAVYYCAARKTGYPGYWYWGQGTQVTVSS

SEQ ID NO: 38705 - protein, 118 aa, Artificial Sequence
  Chemically Synthesized
QVQLQESGGGLVQAGGSLRLSCAASGYISYIFAMGWYRQAPGKERELVASIDHGTTTYYADSVKGRFTISRDNAKNTVYLQMNSLKPEDTAVYYCAAPLLVPYAHYYWGQGTQVTVSS

SEQ ID NO: 38706 - protein, 121 aa, Artificial Sequence
  Chemically Synthesized
QVQLQESGGGLVQAGGSLRLSCAASGSISDHSDMGWYRQAPGKERELVASIAAGGTTYADSVKGRFTISRDNAKNTVYLQMNSLKPEDTAVYYCAVNNTGYIATYGDLWYWGQGTQVTVSS

SEQ ID NO: 38707 - protein, 112 aa, Artificial Sequence
  Chemically Synthesized
QVQLQESGGGLVQAGGSLRLSCAASGTISSNVIMGWYRQAPGKERELVPVLMTVVLPYADSVKGRFTISRDNAKNTVYLQMNSLKPEDTAVYYCAVRSVIYWGQGTQVTVSS

SEQ ID NO: 38708 - protein, 122 aa, Artificial Sequence
  Chemically Synthesized
QVQLQESGGGLVQAGGSLRLSCAASGNIFGEYYMGWYRQAPGKERELVATIDRGTITNYADSVKGRFTISRDNAKNTVYLQMNSLKPEDTAVYYCAAKLTTQYNSDGAHPYWGQGTQVTVSS

SEQ ID NO: 38709 - protein, 121 aa, Artificial Sequence
  Chemically Synthesized
QVQLQESGGGLVQAGGSLRLSCAASGSISLSLMGWYRQAPGKERELVAGIGIGSNTNYADSVKGRFTISRDNAKNTVYLQMNSLKPEDTAVYYCAVNGYYYYYDWYDYGYWGQGTQVTVSS

SEQ ID NO: 38710 - protein, 122 aa, Artificial Sequence
  Chemically Synthesized
QVQLQESGGGLVQAGGSLRLSCAASGTIFNQAYMGWYRQAPGKEREFVAAITRGSTTYYADSVKGRFTISRDNAKNTVYLQMNSLKPEDTAVYYCAVGVAGSSDRPLDLTYWGQGTQVTVSS

SEQ ID NO: 38711 - protein, 121 aa, Artificial Sequence
  Chemically Synthesized
QVQLQESGGGLVQAGGSLRLSCAASGTISSRYTMGWYRQAPGKEREFVASIALGGNTNYADSVKGRFTISRDNAKNTVYLQMNSLKPEDTAVYYCAALYGYYFGWYYHFYWGQGTQVTVSS

SEQ ID NO: 38712 - protein, 126 aa, Artificial Sequence
  Chemically Synthesized
QVQLQESGGGLVQAGGSLRLSCAASGYISGGWEMGWYRQAPGKEREFVAAINAGASTYYADSVKGRFTISRDNAKNTVYLQMNSLKPEDTAVYYCAVLITDWRYRAVDNLRYHPYWGQGTQVTVSS

SEQ ID NO: 38713 - protein, 118 aa, Artificial Sequence
  Chemically Synthesized
QVQLQESGGGLVQAGGSLRLSCAASGSISRDSAMGWYRQAPGKERELVATIGWGGTTNYADSVKGRFTISRDNAKNTVYLQMNSLKPEDTAVYYCAAGLYNITYLWYWGQGTQVTVSS

SEQ ID NO: 38714 - protein, 116 aa, Artificial Sequence
  Chemically Synthesized
QVQLQESGGGLVQAGGSLRLSCAASGTIFGSTMGWYRQAPGKEREFVAGIAYGANTNYADSVKGRFTISRDNAKNTVYLQMNSLKPEDTAVYYCAVYLPWLDSLYWGQGTQVTVSS

SEQ ID NO: 38715 - protein, 118 aa, Artificial Sequence
  Chemically Synthesized
QVQLQESGGGLVQAGGSLRLSCAASGYISFWLHMGWYRQAPGKERELVATINRGTNTYYADSVKGRFTISRDNAKNTVYLQMNSLKPEDTAVYYCAVDRYHRYYFLYWGQGTQVTVSS

SEQ ID NO: 38716 - protein, 124 aa, Artificial Sequence
  Chemically Synthesized
QVQLQESGGGLVQAGGSLRLSCAASGNISFYSYMGWYRQAPGKERELVATIDSVLIPYADSVKGRFTISRDNAKNTVYLQMNSLKPEDTAVYYCAVNYQHDAEVSPYGVDYGYWGQGTQVTVSS

SEQ ID NO: 38717 - protein, 118 aa, Artificial Sequence
  Chemically Synthesized
QVQLQESGGGLVQAGGSLRLSCAASGSISLYAVMGWYRQAPGKERELVATIASGGTTYYADSVKGRFTISRDNAKNTVYLQMNSLKPEDTAVYYCAVVTYDGYPYPYWGQGTQVTVSS

SEQ ID NO: 38718 - protein, 122 aa, Artificial Sequence
  Chemically Synthesized
QVQLQESGGGLVQAGGSLRLSCAASGTIFSLVYMGWYRQAPGKEREFVASIAVGTSTYYADSVKGRFTISRDNAKNTVYLQMNSLKPEDTAVYYCAAWDTVDDPHGDFLYYWGQGTQVTVSS

SEQ ID NO: 38719 - protein, 117 aa, Artificial Sequence
  Chemically Synthesized
QVQLQESGGGLVQAGGSLRLSCAASGYIFALVMGWYRQAPGKEREFVAAIDDGTITNYADSVKGRFTISRDNAKNTVYLQMNSLKPEDTAVYYCAAALKVTVDFTYWGQGTQVTVSS

SEQ ID NO: 38720 - protein, 121 aa, Artificial Sequence
  Chemically Synthesized
QVQLQESGGGLVQAGGSLRLSCAASGNISATRAMGWYRQAPGKERELVASIAGTNTYYADSVKGRFTISRDNAKNTVYLQMNSLKPEDTAVYYCAVEAYPLSTARYAHYYWGQGTQVTVSS

SEQ ID NO: 38721 - protein, 121 aa, Artificial Sequence
  Chemically Synthesized
QVQLQESGGGLVQAGGSLRLSCAASGTISGTDEMGWYRQAPGKERELVATIGIGTNTYYADSVKGRFTISRDNAKNTVYLQMNSLKPEDTAVYYCAAPEDYVYDITYSYYWGQGTQVTVSS

SEQ ID NO: 38722 - protein, 122 aa, Artificial Sequence
  Chemically Synthesized
QVQLQESGGGLVQAGGSLRLSCAASGSIFEYPYMGWYRQAPGKERELVATIGDGGTTYYADSVKGRFTISRDNAKNTVYLQMNSLKPEDTAVYYCAAYPVALWPITDQHYYWGQGTQVTVSS

SEQ ID NO: 38723 - protein, 118 aa, Artificial Sequence
  Chemically Synthesized
QVQLQESGGGLVQAGGSLRLSCAASGNISTDVVMGWYRQAPGKERELVAAIDGGTITYYADSVKGRFTISRDNAKNTVYLQMNSLKPEDTAVYYCAVQYEERIPLRYWGQGTQVTVSS

SEQ ID NO: 38724 - protein, 117 aa, Artificial Sequence
  Chemically Synthesized
QVQLQESGGGLVQAGGSLRLSCAASGYISLVNKMGWYRQAPGKERELVAAITFGAITNYADSVKGRFTISRDNAKNTVYLQMNSLKPEDTAVYYCAVATRDDYHDYWGQGTQVTVSS

SEQ ID NO: 38725 - protein, 117 aa, Artificial Sequence
  Chemically Synthesized
QVQLQESGGGLVQAGGSLRLSCAASGYISGRTMGWYRQAPGKEREFVASITIGSSTYYADSVKGRFTISRDNAKNTVYLQMNSLKPEDTAVYYCAAWYPFTRRYYYWGQGTQVTVSS

SEQ ID NO: 38726 - protein, 118 aa, Artificial Sequence
  Chemically Synthesized
QVQLQESGGGLVQAGGSLRLSCAASGNISYYTVMGWYRQAPGKERELVAAINRGSTTYYADSVKGRFTISRDNAKNTVYLQMNSLKPEDTAVYYCAVILDITSRYDYWGQGTQVTVSS

SEQ ID NO: 38727 - protein, 125 aa, Artificial Sequence
  Chemically Synthesized
QVQLQESGGGLVQAGGSLRLSCAASGNISYDDMGWYRQAPGKERELVAAIDTGGSTNYADSVKGRFTISRDNAKNTVYLQMNSLKPEDTAVYYCAAGYYRNVYGWRHGRRYFYYWGQGTQVTVSS

SEQ ID NO: 38728 - protein, 118 aa, Artificial Sequence
  Chemically Synthesized
QVQLQESGGGLVQAGGSLRLSCAASGSIFYDTFMGWYRQAPGKEREFVASIGEGTITYYADSVKGRFTISRDNAKNTVYLQMNSLKPEDTAVYYCAAGVTLPTVLRYWGQGTQVTVSS

SEQ ID NO: 38729 - protein, 125 aa, Artificial Sequence
  Chemically Synthesized
QVQLQESGGGLVQAGGSLRLSCAASGNISSVQGMGWYRQAPGKEREFVASINSVVIPYADSVKGRFTISRDNAKNTVYLQMNSLKPEDTAVYYCAADKVQYGTNADRSSAPFSYWGQGTQVTVSS

SEQ ID NO: 38730 - protein, 122 aa, Artificial Sequence
  Chemically Synthesized
QVQLQESGGGLVQAGGSLRLSCAASGTISDFVAMGWYRQAPGKERELVAGIGQGGTTYYADSVKGRFTISRDNAKNTVYLQMNSLKPEDTAVYYCAAYYRDGQTGVYWYAYWGQGTQVTVSS

SEQ ID NO: 38731 - protein, 117 aa, Artificial Sequence
  Chemically Synthesized
QVQLQESGGGLVQAGGSLRLSCAASGTIFVIYFMGWYRQAPGKEREFVALLILVLLPYADSVKGRFTISRDNAKNTVYLQMNSLKPEDTAVYYCAADAVPSQGHDYWGQGTQVTVSS

SEQ ID NO: 38732 - protein, 118 aa, Artificial Sequence
  Chemically Synthesized
QVQLQESGGGLVQAGGSLRLSCAASGYISYLYIMGWYRQAPGKERELVATIGTGAITNYADSVKGRFTISRDNAKNTVYLQMNSLKPEDTAVYYCAVGTYYYYLLRYWGQGTQVTVSS

SEQ ID NO: 38733 - protein, 117 aa, Artificial Sequence
  Chemically Synthesized
QVQLQESGGGLVQAGGSLRLSCAASGYISFALLMGWYRQAPGKEREFLPVLMLVLLPYADSVKGRFTISRDNAKNTVYLQMNSLKPEDTAVYYCAVDDFDQAAHVYWGQGTQVTVSS

SEQ ID NO: 38734 - protein, 118 aa, Artificial Sequence
  Chemically Synthesized
QVQLQESGGGLVQAGGSLRLSCAASGYIFYPSYMGWYRQAPGKERELVAAIGDGSSTYYADSVKGRFTISRDNAKNTVYLQMNSLKPEDTAVYYCAVYYYYYSYLRYWGQGTQVTVSS

SEQ ID NO: 38735 - protein, 118 aa, Artificial Sequence
  Chemically Synthesized
QVQLQESGGGLVQAGGSLRLSCAASGSIFTRIWMGWYRQAPGKERELVAAITVGTTTYYADSVKGRFTISRDNAKNTVYLQMNSLKPEDTAVYYCAVYSYRTDALDYWGQGTQVTVSS

SEQ ID NO: 38736 - protein, 121 aa, Artificial Sequence
  Chemically Synthesized
QVQLQESGGGLVQAGGSLRLSCAASGTISLDYQMGWYRQAPGKERELVAGINDGSSTNYADSVKGRFTISRDNAKNTVYLQMNSLKPEDTAVYYCAVIAGTSSDYEQHGYWGQGTQVTVSS

SEQ ID NO: 38737 - protein, 118 aa, Artificial Sequence
  Chemically Synthesized
QVQLQESGGGLVQAGGSLRLSCAASGTIFDPSYMGWYRQAPGKEREFVASINTGSSTNYADSVKGRFTISRDNAKNTVYLQMNSLKPEDTAVYYCAAAVYQGYQHYYWGQGTQVTVSS

SEQ ID NO: 38738 - protein, 118 aa, Artificial Sequence
  Chemically Synthesized
QVQLQESGGGLVQAGGSLRLSCAASGNISYVRVMGWYRQAPGKERELVAGIADGSITNYADSVKGRFTISRDNAKNTVYLQMNSLKPEDTAVYYCAASGPYDDGLYYWGQGTQVTVSS

SEQ ID NO: 38739 - protein, 122 aa, Artificial Sequence
  Chemically Synthesized
QVQLQESGGGLVQAGGSLRLSCAASGTIFPLDLMGWYRQAPGKEREFVAGIGVGTITNYADSVKGRFTISRDNAKNTVYLQMNSLKPEDTAVYYCAARLDDRTGYQDDYDYWGQGTQVTVSS

SEQ ID NO: 38740 - protein, 115 aa, Artificial Sequence
  Chemically Synthesized
QVQLQESGGGLVQAGGSLRLSCAASGSIFRYDTMGWYRQAPGKERELVATITRGTSTYYADSVKGRFTISRDNAKNTVYLQMNSLKPEDTAVYYCAVGGGHHSYWGQGTQVTVSS

SEQ ID NO: 38741 - protein, 122 aa, Artificial Sequence
  Chemically Synthesized
QVQLQESGGGLVQAGGSLRLSCAASGNISGGPYYMGWYRQAPGKEREFVATIDGGSSTNYADSVKGRFTISRDNAKNTVYLQMNSLKPEDTAVYYCAVHSLYFEWPPIHLYWGQGTQVTVSS

SEQ ID NO: 38742 - protein, 117 aa, Artificial Sequence
  Chemically Synthesized
QVQLQESGGGLVQAGGSLRLSCAASGSIFLSAMGWYRQAPGKEREFVAGIDDGAITYYADSVKGRFTISRDNAKNTVYLQMNSLKPEDTAVYYCAAYITYNDEFPYWGQGTQVTVSS

SEQ ID NO: 38743 - protein, 126 aa, Artificial Sequence
  Chemically Synthesized
QVQLQESGGGLVQAGGSLRLSCAASGTISSRRYMGWYRQAPGKERELVATINRGGITNYADSVKGRFTISRDNAKNTVYLQMNSLKPEDTAVYYCAVNEPSNRFHSSQYWVRHPYWGQGTQVTVSS

SEQ ID NO: 38744 - protein, 118 aa, Artificial Sequence
  Chemically Synthesized
QVQLQESGGGLVQAGGSLRLSCAASGTISYFTIMGWYRQAPGKERELVAGITGGATTNYADSVKGRFTISRDNAKNTVYLQMNSLKPEDTAVYYCAVAHRDLSWLDYWGQGTQVTVSS

SEQ ID NO: 38745 - protein, 122 aa, Artificial Sequence
  Chemically Synthesized
QVQLQESGGGLVQAGGSLRLSCAASGTISLPDTMGWYRQAPGKERELVATISIGSNTNYADSVKGRFTISRDNAKNTVYLQMNSLKPEDTAVYYCAADASLAGTGGRDHLYWGQGTQVTVSS

SEQ ID NO: 38746 - protein, 115 aa, Artificial Sequence
  Chemically Synthesized
QVQLQESGGGLVQAGGSLRLSCAASGNIFVYTFMGWYRQAPGKERELVATIGVGTTTYYADSVKGRFTISRDNAKNTVYLQMNSLKPEDTAVYYCAAGRLYHYYWGQGTQVTVSS

SEQ ID NO: 38747 - protein, 115 aa, Artificial Sequence
  Chemically Synthesized
QVQLQESGGGLVQAGGSLRLSCAASGYIFPAYYMGWYRQAPGKEREFVASIDYGASTYYADSVKGRFTISRDNAKNTVYLQMNSLKPEDTAVYYCAAALHYLDYWGQGTQVTVSS

SEQ ID NO: 38748 - protein, 110 aa, Artificial Sequence
  Chemically Synthesized
QVQLQESGGGLVQAGGSLRLSCAASGSISDWTMGWYRQAPGKERELVATIGLGAITYYADSVKGRFTISRDNAKNTVYLQMNSLKPEDTAVYYCAAAWYWGQGTQVTVSS

SEQ ID NO: 38749 - protein, 118 aa, Artificial Sequence
  Chemically Synthesized
QVQLQESGGGLVQAGGSLRLSCAASGTIFRYYAMGWYRQAPGKEREFVAAIGFGTTTNYADSVKGRFTISRDNAKNTVYLQMNSLKPEDTAVYYCAAGYQGIYVHYYWGQGTQVTVSS

SEQ ID NO: 38750 - protein, 118 aa, Artificial Sequence
  Chemically Synthesized
QVQLQESGGGLVQAGGSLRLSCAASGNIFRRGYMGWYRQAPGKERELVASISGGASTYYADSVKGRFTISRDNAKNTVYLQMNSLKPEDTAVYYCAVFYGYLRRYVYWGQGTQVTVSS

SEQ ID NO: 38751 - protein, 125 aa, Artificial Sequence
  Chemically Synthesized
QVQLQESGGGLVQAGGSLRLSCAASGTIFLVQIMGWYRQAPGKERELVASISSGSNTYYADSVKGRFTISRDNAKNTVYLQMNSLKPEDTAVYYCAADNTYSYDLSRLNTWTIYWGQGTQVTVSS

SEQ ID NO: 38752 - protein, 122 aa, Artificial Sequence
  Chemically Synthesized
QVQLQESGGGLVQAGGSLRLSCAASGSISWTHGMGWYRQAPGKERELVATISYGTITNYADSVKGRFTISRDNAKNTVYLQMNSLKPEDTAVYYCAVDQDDHSYSDNDYDYWGQGTQVTVSS

SEQ ID NO: 38753 - protein, 122 aa, Artificial Sequence
  Chemically Synthesized
QVQLQESGGGLVQAGGSLRLSCAASGNIFGISDMGWYRQAPGKEREFVAGIGHGSTTYYADSVKGRFTISRDNAKNTVYLQMNSLKPEDTAVYYCAAGQGNVQDDDIDYHYWGQGTQVTVSS

SEQ ID NO: 38754 - protein, 124 aa, Artificial Sequence
  Chemically Synthesized
QVQLQESGGGLVQAGGSLRLSCAASGTISWPRDMGWYRQAPGKEREFVAGIAGGTSTNYADSVKGRFTISRDNAKNTVYLQMNSLKPEDTAVYYCAAWGRDSQSLAGDAHHPYWGQGTQVTVSS

SEQ ID NO: 38755 - protein, 126 aa, Artificial Sequence
  Chemically Synthesized
QVQLQESGGGLVQAGGSLRLSCAASGTIFDVLYMGWYRQAPGKERELVATITIGSNTNYADSVKGRFTISRDNAKNTVYLQMNSLKPEDTAVYYCAVLYNASADSWSDYSRRLVYWGQGTQVTVSS

SEQ ID NO: 38756 - protein, 118 aa, Artificial Sequence
  Chemically Synthesized
QVQLQESGGGLVQAGGSLRLSCAASGSIFDAGDMGWYRQAPGKEREFVAAISDGANTNYADSVKGRFTISRDNAKNTVYLQMNSLKPEDTAVYYCAAAVAIDERHDYWGQGTQVTVSS

SEQ ID NO: 38757 - protein, 126 aa, Artificial Sequence
  Chemically Synthesized
QVQLQESGGGLVQAGGSLRLSCAASGSISGIDEMGWYRQAPGKERELVAAIDWGGNTNYADSVKGRFTISRDNAKNTVYLQMNSLKPEDTAVYYCAALWIHPGSDTIYLSRAHLYWGQGTQVTVSS

SEQ ID NO: 38758 - protein, 118 aa, Artificial Sequence
  Chemically Synthesized
QVQLQESGGGLVQAGGSLRLSCAASGSIFASYTMGWYRQAPGKEREFVAAISLGANTNYADSVKGRFTISRDNAKNTVYLQMNSLKPEDTAVYYCAVVESNTDSYIYWGQGTQVTVSS

SEQ ID NO: 38759 - protein, 118 aa, Artificial Sequence
  Chemically Synthesized
QVQLQESGGGLVQAGGSLRLSCAASGTISYYIRMGWYRQAPGKEREFVASITIGASTYYADSVKGRFTISRDNAKNTVYLQMNSLKPEDTAVYYCAAYWSYQRGYSYWGQGTQVTVSS

SEQ ID NO: 38760 - protein, 123 aa, Artificial Sequence
  Chemically Synthesized
QVQLQESGGGLVQAGGSLRLSCAASGTISPRYDMGWYRQAPGKERELVAGIDSGGGSTNYADSVKGRFTISRDNAKNTVYLQMNSLKPEDTAVYYCAAEVYRLAEQLKDLGYWGQGTQVTVSS

SEQ ID NO: 38761 - protein, 123 aa, Artificial Sequence
  Chemically Synthesized
QVQLQESGGGLVQAGGSLRLSCAASGTISRGRYMGWYRQAPGKERELVASIAAGGNTNYADSVKGRFTISRDNAKNTVYLQMNSLKPEDTAVYYCAVPYLVGYAETGWTLYYWGQGTQVTVSS

SEQ ID NO: 38762 - protein, 120 aa, Artificial Sequence
  Chemically Synthesized
QVQLQESGGGLVQAGGSLRLSCAASGTIFLAYLMGWYRQAPGKEREFVAAITLVLVPYADSVKGRFTISRDNAKNTVYLQMNSLKPEDTAVYYCAADRASRVTDGYLGYWGQGTQVTVSS

SEQ ID NO: 38763 - protein, 118 aa, Artificial Sequence
  Chemically Synthesized
QVQLQESGGGLVQAGGSLRLSCAASGSISLLGNMGWYRQAPGKEREFVAGITYGANTNYADSVKGRFTISRDNAKNTVYLQMNSLKPEDTAVYYCAAGYADYSQLYYWGQGTQVTVSS

SEQ ID NO: 38764 - protein, 111 aa, Artificial Sequence
  Chemically Synthesized
QVQLQESGGGLVQAGGSLRLSCAASGSIFYDRYMGWYRQAPGKEREFVASIGTGGTTNYADSVKGRFTISRDNAKNTVYLQMNSLKPEDTAVYYCATHYYWGQGTQVTVSS

SEQ ID NO: 38765 - protein, 122 aa, Artificial Sequence
  Chemically Synthesized
QVQLQESGGGLVQAGGSLRLSCAASGSIFYRYLMGWYRQAPGKERELVATIGYGTITNYADSVKGRFTISRDNAKNTVYLQMNSLKPEDTAVYYCAVADQSLDNRTDLHPYWGQGTQVTVSS

SEQ ID NO: 38766 - protein, 115 aa, Artificial Sequence
  Chemically Synthesized
QVQLQESGGGLVQAGGSLRLSCAASGSMGWYRQAPGKERELVASIGTGTNNYADSVKGRFTISRDNAKNTVYLQMNSLKPEDTAVYYCAVRRGYRDQREGYYWYWGQGTQVTVSS

SEQ ID NO: 38767 - protein, 118 aa, Artificial Sequence
  Chemically Synthesized
QVQLQESGGGLVQAGGSLRLSCAASGTISSIYPMGWYRQAPGKEREFVAGIDRGANTNYADSVKGRFTISRDNAKNTVYLQMNSLKPEDTAVYYCAAYAYDVYYHVYWGQGTQVTVSS

SEQ ID NO: 38768 - protein, 122 aa, Artificial Sequence
  Chemically Synthesized
QVQLQESGGGLVQAGGSLRLSCAASGNISTYATMGWYRQAPGKERELVATIGDGGSTNYADSVKGRFTISRDNAKNTVYLQMNSLKPEDTAVYYCAVDSDLDTYYSAVPSYWGQGTQVTVSS

SEQ ID NO: 38769 - protein, 118 aa, Artificial Sequence
  Chemically Synthesized
QVQLQESGGGLVQAGGSLRLSCAASGNISYSYRMGWYRQAPGKERELVASIAHGGITNYADSVKGRFTISRDNAKNTVYLQMNSLKPEDTAVYYCAVGYGIGGWYYYWGQGTQVTVSS

SEQ ID NO: 38770 - protein, 118 aa, Artificial Sequence
  Chemically Synthesized
QVQLQESGGGLVQAGGSLRLSCAASGNIFDYYSMGWYRQAPGKERELVAAIDDGTSTNYADSVKGRFTISRDNAKNTVYLQMNSLKPEDTAVYYCAAGWTTFLYYDYWGQGTQVTVSS

SEQ ID NO: 38771 - protein, 126 aa, Artificial Sequence
  Chemically Synthesized
QVQLQESGGGLVQAGGSLRLSCAASGSIFRAGYMGWYRQAPGKEREFVAAIGYGSITYYADSVKGRFTISRDNAKNTVYLQMNSLKPEDTAVYYCAAHLNAGPDSIDSRWPEYFYWGQGTQVTVSS

SEQ ID NO: 38772 - protein, 120 aa, Artificial Sequence
  Chemically Synthesized
QVQLQESGGGLVQAGGSLRLSCAASGSIFDSARMGWYRQAPGKEREFVAGMISVVIPYADSVKGRFTISRDNAKNTVYLQMNSLKPEDTAVYYCAVGLTRDSSSVTLMYWGQGTQVTVSS

SEQ ID NO: 38773 - protein, 118 aa, Artificial Sequence
  Chemically Synthesized
QVQLQESGGGLVQAGGSLRLSCAASGSIFISWRMGWYRQAPGKEREFVASIAYGGITYYADSVKGRFTISRDNAKNTVYLQMNSLKPEDTAVYYCAVREGASSGLAYWGQGTQVTVSS

SEQ ID NO: 38774 - protein, 122 aa, Artificial Sequence
  Chemically Synthesized
QVQLQESGGGLVQAGGSLRLSCAASGSIFASQVMGWYRQAPGKEREFVASITDGGTTNYADSVKGRFTISRDNAKNTVYLQMNSLKPEDTAVYYCANVYLPRQYQPGTTIYWGQGTQVTVSS

SEQ ID NO: 38775 - protein, 118 aa, Artificial Sequence
  Chemically Synthesized
QVQLQESGGGLVQAGGSLRLSCAASGSISGGFAMGWYRQAPGKERELVAGITYGTITNYADSVKGRFTISRDNAKNTVYLQMNSLKPEDTAVYYCAVSKREFDSYLYWGQGTQVTVSS

SEQ ID NO: 38776 - protein, 121 aa, Artificial Sequence
  Chemically Synthesized
QVQLQESGGGLVQAGGSLRLSCAASGNISGYRYMGWYRQAPGKERELVAAINRGSTTYADSVKGRFTISRDNAKNTVYLQMNSLKPEDTAVYYCAVAISSYPYGGYYHYYWGQGTQVTVSS

SEQ ID NO: 38777 - protein, 116 aa, Artificial Sequence
  Chemically Synthesized
QVQLQESGGGLVQAGGSLRLSCAASGSISHTAGMGWYRQAPGKERELVAAIGRGAITYYADSVKGRFTISRDNAKNTVYLQMNSLKPEDTAVYYCAAWDVYRHGYWGQGTQVTVSS

SEQ ID NO: 38778 - protein, 118 aa, Artificial Sequence
  Chemically Synthesized
QVQLQESGGGLVQAGGSLRLSCAASGTISGYRDMGWYRQAPGKEREFVAAIALGGITYYADSVKGRFTISRDNAKNTVYLQMNSLKPEDTAVYYCAAENGEPESHEYWGQGTQVTVSS

SEQ ID NO: 38779 - protein, 117 aa, Artificial Sequence
  Chemically Synthesized
QVQLQESGGGLVQAGGSLRLSCAASGSIFGQPMGWYRQAPGKEREFVAAIDTGALPNYADSVKGRFTISRDNAKNTVYLQMNSLKPEDTAVYYCAVSSYVSSFLSYWGQGTQVTVSS

SEQ ID NO: 38780 - protein, 122 aa, Artificial Sequence
  Chemically Synthesized
QVQLQESGGGLVQAGGSLRLSCAASGNISQRPVMGWYRQAPGKEREFVAAIGRGSITYYADSVKGRFTISRDNAKNTVYLQMNSLKPEDTAVYYCAANRGRQHLGRVYHGYWGQGTQVTVSS

SEQ ID NO: 38781 - protein, 118 aa, Artificial Sequence
  Chemically Synthesized
QVQLQESGGGLVQAGGSLRLSCAASGYIFLDGFMGWYRQAPGKEREFVAAINYGTSTYYADSVKGRFTISRDNAKNTVYLQMNSLKPEDTAVYYCAVGSGWWGGHGYWGQGTQVTVSS

SEQ ID NO: 38782 - protein, 122 aa, Artificial Sequence
  Chemically Synthesized
QVQLQESGGGLVQAGGSLRLSCAASGNISSVYSMGWYRQAPGKERELVAGIGTGSSTYYADSVKGRFTISRDNAKNTVYLQMNSLKPEDTAVYYCAAYSQYDVNDTLAHAYWGQGTQVTVSS

SEQ ID NO: 38783 - protein, 122 aa, Artificial Sequence
  Chemically Synthesized
QVQLQESGGGLVQAGGSLRLSCAASGNISGAQLMGWYRQAPGKERELVAGINYGSTTNYADSVKGRFTISRDNAKNTVYLQMNSLKPEDTAVYYCAADKSYYASDDKYLDYWGQGTQVTVSS

SEQ ID NO: 38784 - protein, 120 aa, Artificial Sequence
  Chemically Synthesized
QVQLQESGGGLVQAGGSLRLSCAASGSISLYTMGWYRQAPGKERELVAGISWGGNTYYADSVKGRFTISRDNAKNTVYLQMNSLKPEDTAVYYCAAEGDDSTTDDPHLYWGQGTQVTVSS

SEQ ID NO: 38785 - protein, 120 aa, Artificial Sequence
  Chemically Synthesized
QVQLQESGGGLVQAGGSLRLSCAASGYISSQTDMGWYRQAPGKEREFVATINAWYYYQYADSVKGRFTISRDNAKNTVYLQMNSLKPEDTAVYYCAAGTGAADPGIPCYWGQGTQVTVSS

SEQ ID NO: 38786 - protein, 118 aa, Artificial Sequence
  Chemically Synthesized
QVQLQESGGGLVQAGGSLRLSCAASGSISRRFIMGWYRQAPGKEREFVAGIDTGAITYYADSVKGRFTISRDNAKNTVYLQMNSLKPEDTAVYYCAADDQVRPVLSYWGQGTQVTVSS

SEQ ID NO: 38787 - protein, 118 aa, Artificial Sequence
  Chemically Synthesized
QVQLQESGGGLVQAGGSLRLSCAASGNIFYIYPMGWYRQAPGKEREFVAAITRGANTNYADSVKGRFTISRDNAKNTVYLQMNSLKPEDTAVYYCAVFRIPFTWLRYWGQGTQVTVSS

SEQ ID NO: 38788 - protein, 118 aa, Artificial Sequence
  Chemically Synthesized
QVQLQESGGGLVQAGGSLRLSCAASGYISWAIYMGWYRQAPGKERELVAAIAQGSTTNYADSVKGRFTISRDNAKNTVYLQMNSLKPEDTAVYYCAVVYALWGPHVYWGQGTQVTVSS

SEQ ID NO: 38789 - protein, 118 aa, Artificial Sequence
  Chemically Synthesized
QVQLQESGGGLVQAGGSLRLSCAASGTIFPPGTMGWYRQAPGKERELVAAIDGGGSTNYADSVKGRFTISRDNAKNTVYLQMNSLKPEDTAVYYCAAWFLPYAWHDYWGQGTQVTVSS

SEQ ID NO: 38790 - protein, 118 aa, Artificial Sequence
  Chemically Synthesized
QVQLQESGGGLVQAGGSLRLSCAASGYISRTVFMGWYRQAPGKEREFVATINFGASTYYADSVKGRFTISRDNAKNTVYLQMNSLKPEDTAVYYCAVTYRRQRYHRYWGQGTQVTVSS

SEQ ID NO: 38791 - protein, 112 aa, Artificial Sequence
  Chemically Synthesized
QVQLQESGGGLVQAGGSLRLSCAASGTIFTDGTMGWYRQAPGKEREFVASIDDGGNTNYADSVKGRFTISRDNAKNTVYLQMNSLKPEDTAVYYCAAYLGYWGQGTQVTVSS

SEQ ID NO: 38792 - protein, 118 aa, Artificial Sequence
  Chemically Synthesized
QVQLQESGGGLVQAGGSLRLSCAASGYIFGSDDMGWYRQAPGKEREFVAAITYGANTNYADSVKGRFTISRDNAKNTVYLQMNSLKPEDTAVYYCAAGAPHQLDFRYWGQGTQVTVSS

SEQ ID NO: 38793 - protein, 117 aa, Artificial Sequence
  Chemically Synthesized
QVQLQESGGGLVQAGGSLRLSCAASGNISVAATMGWYRQAPGKERELVATINWGSTTNYADSVKGRFTISRDNAKNTVYLQMNSLKPEDTAVYYCAARANGSESMYWGQGTQVTVSS

SEQ ID NO: 38794 - protein, 126 aa, Artificial Sequence
  Chemically Synthesized
QVQLQESGGGLVQAGGSLRLSCAASGSISSYFAMGWYRQAPGKERELVATINLGSTTNYADSVKGRFTISRDNAKNTVYLQMNSLKPEDTAVYYCAVLGRNDYRTSIRRAGYHYYWGQGTQVTVSS

SEQ ID NO: 38795 - protein, 122 aa, Artificial Sequence
  Chemically Synthesized
QVQLQESGGGLVQAGGSLRLSCAASGYISPYGAMGWYRQAPGKEREFVAGIGWGGTTNYADSVKGRFTISRDNAKNTVYLQMNSLKPEDTAVYYCAAYPQSPISVWVSYPYWGQGTQVTVSS

SEQ ID NO: 38796 - protein, 126 aa, Artificial Sequence
  Chemically Synthesized
QVQLQESGGGLVQAGGSLRLSCAASGNISGFLSMGWYRQAPGKERELVAAITWGTTTNYADSVKGRFTISRDNAKNTVYLQMNSLKPEDTAVYYCAVQDYGLSDANVRAIIQHAYWGQGTQVTVSS

SEQ ID NO: 38797 - protein, 118 aa, Artificial Sequence
  Chemically Synthesized
QVQLQESGGGLVQAGGSLRLSCAASGSIFVLRAMGWYRQAPGKEREFVAAIGGGGSTYYADSVKGRFTISRDNAKNTVYLQMNSLKPEDTAVYYCAVYDVDYDRFYYWGQGTQVTVSS

SEQ ID NO: 38798 - protein, 118 aa, Artificial Sequence
  Chemically Synthesized
QVQLQESGGGLVQAGGSLRLSCAASGTISYVLSMGWYRQAPGKERELVASINGGAITNYADSVKGRFTISRDNAKNTVYLQMNSLKPEDTAVYYCAAYTYYDHDYLYWGQGTQVTVSS

SEQ ID NO: 38799 - protein, 125 aa, Artificial Sequence
  Chemically Synthesized
QVQLQESGGGLVQAGGSLRLSCAASGYISREDMGWYRQAPGKERELVAAINGGATTNYADSVKGRFTISRDNAKNTVYLQMNSLKPEDTAVYYCAVYAYAGQRTTDYAYSDHLYWGQGTQVTVSS

SEQ ID NO: 38800 - protein, 118 aa, Artificial Sequence
  Chemically Synthesized
QVQLQESGGGLVQAGGSLRLSCAASGSISADLDMGWYRQAPGKERELVATITRGGSTYYADSVKGRFTISRDNAKNTVYLQMNSLKPEDTAVYYCAALEAFPLYFYYWGQGTQVTVSS

SEQ ID NO: 38801 - protein, 111 aa, Artificial Sequence
  Chemically Synthesized
QVQLQESGGGLVQAGGSLRLSCAASGTIFDVEYMGWYRQAPGKEREFVAAISFGAITYYADSVKGRFTISRDNAKNTVYLQMNSLKPEDTAVYYCADHSYWGQGTQVTVSS

SEQ ID NO: 38802 - protein, 121 aa, Artificial Sequence
  Chemically Synthesized
QVQLQESGGGLVQAGGSLRLSCAASGTISLRDMGWYRQAPGKERELVAGITSGASTYYADSVKGRFTISRDNAKNTVYLQMNSLKPEDTAVYYCAATTPSKSDASGYYAYWGQGTQVTVSS

SEQ ID NO: 38803 - protein, 126 aa, Artificial Sequence
  Chemically Synthesized
QVQLQESGGGLVQAGGSLRLSCAASGTISYLPIMGWYRQAPGKEREFVATIGRGGTTNYADSVKGRFTISRDNAKNTVYLQMNSLKPEDTAVYYCAVIVYYPGGGYRWYGQWYSYWGQGTQVTVSS

SEQ ID NO: 38804 - protein, 126 aa, Artificial Sequence
  Chemically Synthesized
QVQLQESGGGLVQAGGSLRLSCAASGTISARDFMGWYRQAPGKERELVATISSGGNTYYADSVKGRFTISRDNAKNTVYLQMNSLKPEDTAVYYCAAHSVLDVLYDVNPLYFHFYWGQGTQVTVSS

SEQ ID NO: 38805 - protein, 118 aa, Artificial Sequence
  Chemically Synthesized
QVQLQESGGGLVQAGGSLRLSCAASGSIFAFGIMGWYRQAPGKEREFVAAINSGANTNYADSVKGRFTISRDNAKNTVYLQMNSLKPEDTAVYYCAVYQHFDQIHVYWGQGTQVTVSS

SEQ ID NO: 38806 - protein, 122 aa, Artificial Sequence
  Chemically Synthesized
QVQLQESGGGLVQAGGSLRLSCAASGNISFNYDMGWYRQAPGKEREFVAAISPGGTTNYADSVKGRFTISRDNAKNTVYLQMNSLKPEDTAVYYCAAPDFTYSRVEVRLLYWGQGTQVTVSS

SEQ ID NO: 38807 - protein, 122 aa, Artificial Sequence
  Chemically Synthesized
QVQLQESGGGLVQAGGSLRLSCAASGTIFYTDYMGWYRQAPGKEREFVAGIGRGTITYYADSVKGRFTISRDNAKNTVYLQMNSLKPEDTAVYYCAVAILDEYSGHGTFAYWGQGTQVTVSS

SEQ ID NO: 38808 - protein, 118 aa, Artificial Sequence
  Chemically Synthesized
QVQLQESGGGLVQAGGSLRLSCAASGSIFRSVWMGWYRQAPGKERELVAAIDDGGTTYYADSVKGRFTISRDNAKNTVYLQMNSLKPEDTAVYYCAVPKLVGRRYTYWGQGTQVTVSS

SEQ ID NO: 38809 - protein, 117 aa, Artificial Sequence
  Chemically Synthesized
QVQLQESGGGLVQAGGSLRLSCAASGSIFPAYRMGWYRQAPGKERELVAGINIGGTTYYADSVKGRFTISRDNAKNTVYLQMNSLKPEDTAVYYCAARYWYWVHRYWGQGTQVTVSS

SEQ ID NO: 38810 - protein, 118 aa, Artificial Sequence
  Chemically Synthesized
QVQLQESGGGLVQAGGSLRLSCAASGTISGLPYMGWYRQAPGKEREFVAAINFGATTNYADSVKGRFTISRDNAKNTVYLQMNSLKPEDTAVYYCAVKDYGYGTHTYWGQGTQVTVSS

SEQ ID NO: 38811 - protein, 118 aa, Artificial Sequence
  Chemically Synthesized
QVQLQESGGGLVQAGGSLRLSCAASGYIFHIRIMGWYRQAPGKERELVASIAQGATTYYADSVKGRFTISRDNAKNTVYLQMNSLKPEDTAVYYCAAVNWSWYRFYYWGQGTQVTVSS

SEQ ID NO: 38812 - protein, 121 aa, Artificial Sequence
  Chemically Synthesized
QVQLQESGGGLVQAGGSLRLSCAASGSISYPYYMGWYRQAPGKEREFVASISYGTSTYYADSVKGRFTISRDNAKNTVYLQMNSLKPEDTAVYYCAVNYRFYRYYAYLTYWGQGTQVTVSS

SEQ ID NO: 38813 - protein, 122 aa, Artificial Sequence
  Chemically Synthesized
QVQLQESGGGLVQAGGSLRLSCAASGYIFPPIKMGWYRQAPGKEREFVAGITPGSTTYYADSVKGRFTISRDNAKNTVYLQMNSLKPEDTAVYYCAVTYRDNRTGRTGHRYWGQGTQVTVSS

SEQ ID NO: 38814 - protein, 126 aa, Artificial Sequence
  Chemically Synthesized
QVQLQESGGGLVQAGGSLRLSCAASGYISRQALMGWYRQAPGKEREFVAAIASGAITYYADSVKGRFTISRDNAKNTVYLQMNSLKPEDTAVYYCAATDYLSPYGHGRYWFDYRYWGQGTQVTVSS

SEQ ID NO: 38815 - protein, 118 aa, Artificial Sequence
  Chemically Synthesized
QVQLQESGGGLVQAGGSLRLSCAASGNISFWHLMGWYRQAPGKERELVAGIAYGTSTYYADSVKGRFTISRDNAKNTVYLQMNSLKPEDTAVYYCAVYPGYGQEHDYWGQGTQVTVSS

SEQ ID NO: 38816 - protein, 122 aa, Artificial Sequence
  Chemically Synthesized
QVQLQESGGGLVQAGGSLRLSCAASGYISATFRMGWYRQAPGKEREFVAAITRGGSTNYADSVKGRFTISRDNAKNTVYLQMNSLKPEDTAVYYCAVGRLGSYNNRGRLRYWGQGTQVTVSS

SEQ ID NO: 38817 - protein, 118 aa, Artificial Sequence
  Chemically Synthesized
QVQLQESGGGLVQAGGSLRLSCAASGYISTYEAMGWYRQAPGKEREFVAAISYGSITNYADSVKGRFTISRDNAKNTVYLQMNSLKPEDTAVYYCAADPRGGVGLIYWGQGTQVTVSS

SEQ ID NO: 38818 - protein, 118 aa, Artificial Sequence
  Chemically Synthesized
QVQLQESGGGLVQAGGSLRLSCAASGNISGANLMGWYRQAPGKEREFVAGIDYGGSTNYADSVKGRFTISRDNAKNTVYLQMNSLKPEDTAVYYCAVTVVLDTSLYYWGQGTQVTVSS

SEQ ID NO: 38819 - protein, 118 aa, Artificial Sequence
  Chemically Synthesized
QVQLQESGGGLVQAGGSLRLSCAASGYISPADYMGWYRQAPGKEREFVAGIDSGTITLYADSVKGRFTISRDNAKNTVYLQMNSLKPEDTAVYYCAAAVDHYGSHAYWGQGTQVTVSS

SEQ ID NO: 38820 - protein, 122 aa, Artificial Sequence
  Chemically Synthesized
QVQLQESGGGLVQAGGSLRLSCAASGNIFDGSIMGWYRQAPGKEREFVATIAFGATTYYADSVKGRFTISRDNAKNTVYLQMNSLKPEDTAVYYCAVTVFDYINAGRTHYYWGQGTQVTVSS

SEQ ID NO: 38821 - protein, 118 aa, Artificial Sequence
  Chemically Synthesized
QVQLQESGGGLVQAGGSLRLSCAASGTIFSPRFMGWYRQAPGKEREFVASIGGGGNTNYADSVKGRFTISRDNAKNTVYLQMNSLKPEDTAVYYCAVPYKHQRGHRYWGQGTQVTVSS

SEQ ID NO: 38822 - protein, 122 aa, Artificial Sequence
  Chemically Synthesized
QVQLQESGGGLVQAGGSLRLSCAASGTISLSIYMGWYRQAPGKERELVAAINIGATTYYADSVKGRFTISRDNAKNTVYLQMNSLKPEDTAVYYCAAVLQYPGQDHTVFNYWGQGTQVTVSS

SEQ ID NO: 38823 - protein, 126 aa, Artificial Sequence
  Chemically Synthesized
QVQLQESGGGLVQAGGSLRLSCAASGSIFVIRYMGWYRQAPGKERELVAAIAVGASTYYADSVKGRFTISRDNAKNTVYLQMNSLKPEDTAVYYCAVPYRGLMTRGRAIRVDHQYWGQGTQVTVSS

SEQ ID NO: 38824 - protein, 122 aa, Artificial Sequence
  Chemically Synthesized
QVQLQESGGGLVQAGGSLRLSCAASGTISGDHGMGWYRQAPGKERELVAGITAGASTNYADSVKGRFTISRDNAKNTVYLQMNSLKPEDTAVYYCAVDPYYAGSVDILYSYWGQGTQVTVSS

SEQ ID NO: 38825 - protein, 122 aa, Artificial Sequence
  Chemically Synthesized
QVQLQESGGGLVQAGGSLRLSCAASGNIFPGLSMGWYRQAPGKERELVAAIAIGATTNYADSVKGRFTISRDNAKNTVYLQMNSLKPEDTAVYYCAVTLGGQYKYGAYFTYWGQGTQVTVSS

SEQ ID NO: 38826 - protein, 118 aa, Artificial Sequence
  Chemically Synthesized
QVQLQESGGGLVQAGGSLRLSCAASGTISDQDYMGWYRQAPGKERELVAAIANGGTTYYADSVKGRFTISRDNAKNTVYLQMNSLKPEDTAVYYCAVWDWGADSHAYWGQGTQVTVSS

SEQ ID NO: 38827 - protein, 118 aa, Artificial Sequence
  Chemically Synthesized
QVQLQESGGGLVQAGGSLRLSCAASGYISGGQYMGWYRQAPGKEREFVAGIASGSNTYYADSVKGRFTISRDNAKNTVYLQMNSLKPEDTAVYYCAAWSWDYAPYAYWGQGTQVTVSS

SEQ ID NO: 38828 - protein, 118 aa, Artificial Sequence
  Chemically Synthesized
QVQLQESGGGLVQAGGSLRLSCAASGTISTDEYMGWYRQAPGKEREFVAAISIGGNTYYADSVKGRFTISRDNAKNTVYLQMNSLKPEDTAVYYCAAWTWDGYQHAYWGQGTQVTVSS

SEQ ID NO: 38829 - protein, 120 aa, Artificial Sequence
  Chemically Synthesized
QVQLQESGGGLVQAGGSLRLSCAASGTISTDEYMGWYRQAPGKEREFVATISDGSSTYYADSVKGRFTISRDNAKNTVYLQMNSLKPEDTAVYYCAAWDGWDDSGTHVYWGQGTQVTVSS

SEQ ID NO: 38830 - protein, 118 aa, Artificial Sequence
  Chemically Synthesized
QVQLQESGGGLVQAGGSLRLSCAASGNISRWGYMGWYRQAPGKERELVAGIDYGTITYYADSVKGRFTISRDNAKNTVYLQMNSLKPEDTAVYYCAAIPTWEDYHAYWGQGTQVTVSS

SEQ ID NO: 38831 - protein, 122 aa, Artificial Sequence
  Chemically Synthesized
QVQLQESGGGLVQAGGSLRLSCAASGTISSVYYMGWYRQAPGKERELVAAIDEGAITYYADSVKGRFTISRDNAKNTVYLQMNSLKPEDTAVYYCAAWLWLSDYAEAEYAYWGQGTQVTVSS

SEQ ID NO: 38832 - protein, 118 aa, Artificial Sequence
  Chemically Synthesized
QVQLQESGGGLVQAGGSLRLSCAASGTISTGDYMGWYRQAPGKEREFVATINPGGSTYYADSVKGRFTISRDNAKNTVYLQMNSLKPEDTAVYYCAVWSWGYGGHVYWGQGTQVTVSS

SEQ ID NO: 38833 - protein, 118 aa, Artificial Sequence
  Chemically Synthesized
QVQLQESGGGLVQAGGSLRLSCAASGYISSYAQMGWYRQAPGKEREFVASIDPGASTYYADSVKGRFTISRDNAKNTVYLQMNSLKPEDTAVYYCAAWSWQPPTYVYWGQGTQVTVSS

SEQ ID NO: 38834 - protein, 122 aa, Artificial Sequence
  Chemically Synthesized
QVQLQESGGGLVQAGGSLRLSCAASGTISRDSWMGWYRQAPGKERELVAAITHGGNTYYADSVKGRFTISRDNAKNTVYLQMNSLKPEDTAVYYCAAWLWGDGVDEADFAYWGQGTQVTVSS

SEQ ID NO: 38835 - protein, 118 aa, Artificial Sequence
  Chemically Synthesized
QVQLQESGGGLVQAGGSLRLSCAASGNISAYDYMGWYRQAPGKERELVAAITPGTSTNYADSVKGRFTISRDNAKNTVYLQMNSLKPEDTAVYYCAVWDWTPPGHVYWGQGTQVTVSS

SEQ ID NO: 38836 - protein, 118 aa, Artificial Sequence
  Chemically Synthesized
QVQLQESGGGLVQAGGSLRLSCAASGSISDAQFMGWYRQAPGKERELVAGIDTGGTTYYADSVKGRFTISRDNAKNTVYLQMNSLKPEDTAVYYCAAAKWNRPQYGYWGQGTQVTVSS

SEQ ID NO: 38837 - protein, 118 aa, Artificial Sequence
  Chemically Synthesized
QVQLQESGGGLVQAGGSLRLSCAASGTIFDYGYMGWYRQAPGKEREFVAGIAPGATTYYADSVKGRFTISRDNAKNTVYLQMNSLKPEDTAVYYCAVWSWTDVRFVYWGQGTQVTVSS

SEQ ID NO: 38838 - protein, 118 aa, Artificial Sequence
  Chemically Synthesized
QVQLQESGGGLVQAGGSLRLSCAASGTISGTGNMGWYRQAPGKERELVAAISGGTTTYYADSVKGRFTISRDNAKNTVYLQMNSLKPEDTAVYYCAVWSWDVATYAYWGQGTQVTVSS

SEQ ID NO: 38839 - protein, 118 aa, Artificial Sequence
  Chemically Synthesized
QVQLQESGGGLVQAGGSLRLSCAASGNIFDDHNMGWYRQAPGKERELVAAITIGTSTYYADSVKGRFTISRDNAKNTVYLQMNSLKPEDTAVYYCAAWDWSSIPHAYWGQGTQVTVSS

SEQ ID NO: 38840 - protein, 118 aa, Artificial Sequence
  Chemically Synthesized
QVQLQESGGGLVQAGGSLRLSCAASGNISHYGYMGWYRQAPGKEREFVAAIAGGGNTYYADSVKGRFTISRDNAKNTVYLQMNSLKPEDTAVYYCAAWEWDATPYAYWGQGTQVTVSS

SEQ ID NO: 38841 - protein, 118 aa, Artificial Sequence
  Chemically Synthesized
QVQLQESGGGLVQAGGSLRLSCAASGTISHPTYMGWYRQAPGKEREFVAGISDGTNTYYADSVKGRFTISRDNAKNTVYLQMNSLKPEDTAVYYCAAITSWDYGYGYWGQGTQVTVSS

SEQ ID NO: 38842 - protein, 118 aa, Artificial Sequence
  Chemically Synthesized
QVQLQESGGGLVQAGGSLRLSCAASGYISGAGQMGWYRQAPGKERELVAAIAYGATTYYADSVKGRFTISRDNAKNTVYLQMNSLKPEDTAVYYCAVWSWDESPYAYWGQGTQVTVSS

SEQ ID NO: 38843 - protein, 122 aa, Artificial Sequence
  Chemically Synthesized
QVQLQESGGGLVQAGGSLRLSCAASGNIFEAGNMGWYRQAPGKEREFVAGIAGGTTTYYADSVKGRFTISRDNAKNTVYLQMNSLKPEDTAVYYCAAWDWGVPQLSDPYVYWGQGTQVTVSS

SEQ ID NO: 38844 - protein, 126 aa, Artificial Sequence
  Chemically Synthesized
QVQLQESGGGLVQAGGSLRLSCAASGNISRGDWMGWYRQAPGKEREFVAAIDPGGITYYADSVKGRFTISRDNAKNTVYLQMNSLKPEDTAVYYCAVWQWYTSVRPSGTDGDYSYWGQGTQVTVSS

SEQ ID NO: 38845 - protein, 118 aa, Artificial Sequence
  Chemically Synthesized
QVQLQESGGGLVQAGGSLRLSCAASGSISGTFWMGWYRQAPGKEREFVAAITGGGTTYYADSVKGRFTISRDNAKNTVYLQMNSLKPEDTAVYYCAVWVWGDVQYVYWGQGTQVTVSS

SEQ ID NO: 38846 - protein, 117 aa, Artificial Sequence
  Chemically Synthesized
QVQLQESGGGLVQAGGSLRLSCAASGYISDDEYMGWYRQAPGKERELVATIFGGITYYADSVKGRFTISRDNAKNTVYLQMNSLKPEDTAVYYCAAWNWDGGQYAYWGQGTQVTVSS

SEQ ID NO: 38847 - protein, 118 aa, Artificial Sequence
  Chemically Synthesized
QVQLQESGGGLVQAGGSLRLSCAASGSIFYRHYMGWYRQAPGKERELVAAISSGANTYYADSVKGRFTISRDNAKNTVYLQMNSLKPEDTAVYYCAAWSWDTPEYAYWGQGTQVTVSS

SEQ ID NO: 38848 - protein, 118 aa, Artificial Sequence
  Chemically Synthesized
QVQLQESGGGLVQAGGSLRLSCAASGTISVTAYMGWYRQAPGKEREFVAAITPGSNTNYADSVKGRFTISRDNAKNTVYLQMNSLKPEDTAVYYCAVWSWRPTEYAYWGQGTQVTVSS

SEQ ID NO: 38849 - protein, 118 aa, Artificial Sequence
  Chemically Synthesized
QVQLQESGGGLVQAGGSLRLSCAASGSIFGYVYMGWYRQAPGKEREFVAGISYGANTYYADSVKGRFTISRDNAKNTVYLQMNSLKPEDTAVYYCAALQRWDSGLGYWGQGTQVTVSS

SEQ ID NO: 38850 - protein, 118 aa, Artificial Sequence
  Chemically Synthesized
QVQLQESGGGLVQAGGSLRLSCAASGSISLYYYMGWYRQAPGKEREFVASISHGAITYYADSVKGRFTISRDNAKNTVYLQMNSLKPEDTAVYYCAAWDWGPYEYAYWGQGTQVTVSS

SEQ ID NO: 38851 - protein, 122 aa, Artificial Sequence
  Chemically Synthesized
QVQLQESGGGLVQAGGSLRLSCAASGYISQRYNMGWYRQAPGKEREFVATITDGGITYYADSVKGRFTISRDNAKNTVYLQMNSLKPEDTAVYYCAVWKWATQLDATYFVYWGQGTQVTVSS

SEQ ID NO: 38852 - protein, 119 aa, Artificial Sequence
  Chemically Synthesized
QVQLQESGGGLVQAGGSLRLSCAASGTIFAPQGMGWYRQAPGKEREFVATITSGANTYYADSVKGRFTISRDNAKNTVYLQMNSLKPEDTAVYYCAAVDHGDNYYHDYWGQGTQVTVSS

SEQ ID NO: 38853 - protein, 122 aa, Artificial Sequence
  Chemically Synthesized
QVQLQESGGGLVQAGGSLRLSCAASGYISYTLYMGWYRQAPGKEREFVASIGLGSTTNYADSVKGRFTISRDNAKNTVYLQMNSLKPEDTAVYYCAAVDYDSRSRARYHDYWGQGTQVTVSS

SEQ ID NO: 38854 - protein, 118 aa, Artificial Sequence
  Chemically Synthesized
QVQLQESGGGLVQAGGSLRLSCAASGNISDTGYMGWYRQAPGKEREFVAAINIGTTTNYADSVKGRFTISRDNAKNTVYLQMNSLKPEDTAVYYCAVWRWDDIPYVYWGQGTQVTVSS

SEQ ID NO: 38855 - protein, 117 aa, Artificial Sequence
  Chemically Synthesized
QVQLQESGGGLVQAGGSLRLSCAASGNIFSVVWMGWYRQAPGKERELVAAINDGTITYYADSVKGRFTISRDNAKNTVYLQMNSLKPEDTAVYYCAAWDWVYDYVYWGQGTQVTVSS

SEQ ID NO: 38856 - protein, 118 aa, Artificial Sequence
  Chemically Synthesized
QVQLQESGGGLVQAGGSLRLSCAASGNIFAPRYMGWYRQAPGKERELVAAIDGGGITYYADSVKGRFTISRDNAKNTVYLQMNSLKPEDTAVYYCAAWDWTPPVYAYWGQGTQVTVSS

SEQ ID NO: 38857 - protein, 118 aa, Artificial Sequence
  Chemically Synthesized
QVQLQESGGGLVQAGGSLRLSCAASGNIFYGPYMGWYRQAPGKEREFVAGIDGGSSTYYADSVKGRFTISRDNAKNTVYLQMNSLKPEDTAVYYCAAWRWNEDPYVYWGQGTQVTVSS

SEQ ID NO: 38858 - protein, 118 aa, Artificial Sequence
  Chemically Synthesized
QVQLQESGGGLVQAGGSLRLSCAASGNIFGYDYMGWYRQAPGKERELVAAIAEGSSTNYADSVKGRFTISRDNAKNTVYLQMNSLKPEDTAVYYCAAWSWDPDPLAYWGQGTQVTVSS

SEQ ID NO: 38859 - protein, 118 aa, Artificial Sequence
  Chemically Synthesized
QVQLQESGGGLVQAGGSLRLSCAASGSIFGDGYMGWYRQAPGKEREFVATITGGGNTYYADSVKGRFTISRDNAKNTVYLQMNSLKPEDTAVYYCAVWDWDDRAYVYWGQGTQVTVSS

SEQ ID NO: 38860 - protein, 118 aa, Artificial Sequence
  Chemically Synthesized
QVQLQESGGGLVQAGGSLRLSCAASGTISTWVYMGWYRQAPGKEREFVAGIGIGSNTNYADSVKGRFTISRDNAKNTVYLQMNSLKPEDTAVYYCAALDTWQGPFGYWGQGTQVTVSS

SEQ ID NO: 38861 - protein, 122 aa, Artificial Sequence
  Chemically Synthesized
QVQLQESGGGLVQAGGSLRLSCAASGYIFDKAYMGWYRQAPGKERELVAAINYGATTYYADSVKGRFTISRDNAKNTVYLQMNSLKPEDTAVYYCAVWRWPTTNDKDRYVYWGQGTQVTVSS

SEQ ID NO: 38862 - protein, 118 aa, Artificial Sequence
  Chemically Synthesized
QVQLQESGGGLVQAGGSLRLSCAASGTISQDAYMGWYRQAPGKERELVATINQGSTTYYADSVKGRFTISRDNAKNTVYLQMNSLKPEDTAVYYCAVWSWGATPYAYWGQGTQVTVSS

SEQ ID NO: 38863 - protein, 118 aa, Artificial Sequence
  Chemically Synthesized
QVQLQESGGGLVQAGGSLRLSCAASGNISVESYMGWYRQAPGKEREFVAAISLGTTTYYADSVKGRFTISRDNAKNTVYLQMNSLKPEDTAVYYCAVWTWNSPTFAYWGQGTQVTVSS

SEQ ID NO: 38864 - protein, 118 aa, Artificial Sequence
  Chemically Synthesized
QVQLQESGGGLVQAGGSLRLSCAASGSISGPDWMGWYRQAPGKERELVATISTGANTYYADSVKGRFTISRDNAKNTVYLQMNSLKPEDTAVYYCAAWSWEDAEYAYWGQGTQVTVSS

SEQ ID NO: 38865 - protein, 118 aa, Artificial Sequence
  Chemically Synthesized
QVQLQESGGGLVQAGGSLRLSCAASGYISGDVYMGWYRQAPGKERELVAGISNGTNTYYADSVKGRFTISRDNAKNTVYLQMNSLKPEDTAVYYCAARTWTTVPHAYWGQGTQVTVSS

SEQ ID NO: 38866 - protein, 118 aa, Artificial Sequence
  Chemically Synthesized
QVQLQESGGGLVQAGGSLRLSCAASGTISGPDWMGWYRQAPGKERELVAAIAAGANTYYADSVKGRFTISRDNAKNTVYLQMNSLKPEDTAVYYCAVWRWYDGPYAYWGQGTQVTVSS

SEQ ID NO: 38867 - protein, 118 aa, Artificial Sequence
  Chemically Synthesized
QVQLQESGGGLVQAGGSLRLSCAASGSISDWQYMGWYRQAPGKEREFVAGINHGGNTYYADSVKGRFTISRDNAKNTVYLQMNSLKPEDTAVYYCAAIDRFTYGLSYWGQGTQVTVSS

SEQ ID NO: 38868 - protein, 118 aa, Artificial Sequence
  Chemically Synthesized
QVQLQESGGGLVQAGGSLRLSCAASGNIFDVYWMGWYRQAPGKEREFVATINEGANTYYADSVKGRFTISRDNAKNTVYLQMNSLKPEDTAVYYCAAWTWERDQHVYWGQGTQVTVSS

SEQ ID NO: 38869 - protein, 118 aa, Artificial Sequence
  Chemically Synthesized
QVQLQESGGGLVQAGGSLRLSCAASGTIFGDGYMGWYRQAPGKEREFVASITVGTNTNYADSVKGRFTISRDNAKNTVYLQMNSLKPEDTAVYYCAAWAWDPTFFVYWGQGTQVTVSS

SEQ ID NO: 38870 - protein, 118 aa, Artificial Sequence
  Chemically Synthesized
QVQLQESGGGLVQAGGSLRLSCAASGSIFQDYYMGWYRQAPGKERELVAAIAYGTSTYYADSVKGRFTISRDNAKNTVYLQMNSLKPEDTAVYYCAVWRWDTDAFAYWGQGTQVTVSS

SEQ ID NO: 38871 - protein, 118 aa, Artificial Sequence
  Chemically Synthesized
QVQLQESGGGLVQAGGSLRLSCAASGYIFDQEYMGWYRQAPGKEREFVAAIASGTSTYYADSVKGRFTISRDNAKNTVYLQMNSLKPEDTAVYYCAAWKWGRYRYVYWGQGTQVTVSS

SEQ ID NO: 38872 - protein, 118 aa, Artificial Sequence
  Chemically Synthesized
QVQLQESGGGLVQAGGSLRLSCAASGNISSWDYMGWYRQAPGKEREFVAAIGDGTNTYYADSVKGRFTISRDNAKNTVYLQMNSLKPEDTAVYYCAAVPYWQDDHRYWGQGTQVTVSS

SEQ ID NO: 38873 - protein, 118 aa, Artificial Sequence
  Chemically Synthesized
QVQLQESGGGLVQAGGSLRLSCAASGTISYADYMGWYRQAPGKERELVAGIGYGSTTYYADSVKGRFTISRDNAKNTVYLQMNSLKPEDTAVYYCAARDFGDRPYGYWGQGTQVTVSS

SEQ ID NO: 38874 - protein, 118 aa, Artificial Sequence
  Chemically Synthesized
QVQLQESGGGLVQAGGSLRLSCAASGSISTSYWMGWYRQAPGKEREFVAGIGPGGTTYYADSVKGRFTISRDNAKNTVYLQMNSLKPEDTAVYYCAVWAWSGYAYAYWGQGTQVTVSS

SEQ ID NO: 38875 - protein, 117 aa, Artificial Sequence
  Chemically Synthesized
QVQLQESGGGLVQAGGSLRLSCAASGSISVRYYMGWYRQAPGKEREFVAAISWGSITYYADSVKGRFTISRDNAKNTVYLQMNSLKPEDTAVYYCAAWSWVTSLAYWGQGTQVTVSS

SEQ ID NO: 38876 - protein, 118 aa, Artificial Sequence
  Chemically Synthesized
QVQLQESGGGLVQAGGSLRLSCAASGYIFGQQLMGWYRQAPGKERELVASIGVGTSTYYADSVKGRFTISRDNAKNTVYLQMNSLKPEDTAVYYCAAWSWEPPAYVYWGQGTQVTVSS

SEQ ID NO: 38877 - protein, 118 aa, Artificial Sequence
  Chemically Synthesized
QVQLQESGGGLVQAGGSLRLSCAASGYISERWWMGWYRQAPGKEREFVAAISAGSTTYYADSVKGRFTISRDNAKNTVYLQMNSLKPEDTAVYYCAAWLWFPQNLAYWGQGTQVTVSS

SEQ ID NO: 38878 - protein, 118 aa, Artificial Sequence
  Chemically Synthesized
QVQLQESGGGLVQAGGSLRLSCAASGSISRYNYMGWYRQAPGKEREFVAAITDGTTTYYADSVKGRFTISRDNAKNTVYLQMNSLKPEDTAVYYCAAWTWGQAAFAYWGQGTQVTVSS

SEQ ID NO: 38879 - protein, 118 aa, Artificial Sequence
  Chemically Synthesized
QVQLQESGGGLVQAGGSLRLSCAASGYIFDDVYMGWYRQAPGKEREFVAGIAYGTSTYYADSVKGRFTISRDNAKNTVYLQMNSLKPEDTAVYYCAAWRWSPYEYVYWGQGTQVTVSS

SEQ ID NO: 38880 - protein, 118 aa, Artificial Sequence
  Chemically Synthesized
QVQLQESGGGLVQAGGSLRLSCAASGNIFSYVYMGWYRQAPGKEREFVAGINQGTNTNYADSVKGRFTISRDNAKNTVYLQMNSLKPEDTAVYYCAAITIWDLGHGYWGQGTQVTVSS

SEQ ID NO: 38881 - protein, 118 aa, Artificial Sequence
  Chemically Synthesized
QVQLQESGGGLVQAGGSLRLSCAASGSIFYVAWMGWYRQAPGKERELVAAIDEGGSTYYADSVKGRFTISRDNAKNTVYLQMNSLKPEDTAVYYCAAWAWAGHAFVYWGQGTQVTVSS

SEQ ID NO: 38882 - protein, 116 aa, Artificial Sequence
  Chemically Synthesized
QVQLQESGGGLVQAGGSLRLSCAASGYISSYDYMGWYRQAPGKEREFVAGIARGTTTYYADSVKGRFTISRDNAKNTVYLQMNSLKPEDTAVYYCAAWDWDVHAYWGQGTQVTVSS

SEQ ID NO: 38883 - protein, 117 aa, Artificial Sequence
  Chemically Synthesized
QVQLQESGGGLVQAGGSLRLSCAASGNISQDFMGWYRQAPGKEREFVAAIDGGATTYYADSVKGRFTISRDNAKNTVYLQMNSLKPEDTAVYYCAVWSWGGRTYVYWGQGTQVTVSS

SEQ ID NO: 38884 - protein, 118 aa, Artificial Sequence
  Chemically Synthesized
QVQLQESGGGLVQAGGSLRLSCAASGNISGSAYMGWYRQAPGKEREFVATIASGTNTYYADSVKGRFTISRDNAKNTVYLQMNSLKPEDTAVYYCAAWSWALSPYVYWGQGTQVTVSS

SEQ ID NO: 38885 - protein, 118 aa, Artificial Sequence
  Chemically Synthesized
QVQLQESGGGLVQAGGSLRLSCAASGSIFGYEWMGWYRQAPGKERELVATIDDGTTTYYADSVKGRFTISRDNAKNTVYLQMNSLKPEDTAVYYCAAWRWDPYAYAYWGQGTQVTVSS

SEQ ID NO: 38886 - protein, 118 aa, Artificial Sequence
  Chemically Synthesized
QVQLQESGGGLVQAGGSLRLSCAASGYISRYDLMGWYRQAPGKERELVAAINVGSTTYYADSVKGRFTISRDNAKNTVYLQMNSLKPEDTAVYYCAVWGWGAQPFVYWGQGTQVTVSS

SEQ ID NO: 38887 - protein, 122 aa, Artificial Sequence
  Chemically Synthesized
QVQLQESGGGLVQAGGSLRLSCAASGTIFDGDYMGWYRQAPGKEREFVATIAVGGNTYYADSVKGRFTISRDNAKNTVYLQMNSLKPEDTAVYYCAVWSWNTLFDDDGYAYWGQGTQVTVSS

SEQ ID NO: 38888 - protein, 122 aa, Artificial Sequence
  Chemically Synthesized
QVQLQESGGGLVQAGGSLRLSCAASGTISTTGYMGWYRQAPGKEREFVAGIDGGTITYYADSVKGRFTISRDNAKNTVYLQMNSLKPEDTAVYYCAVWNWADFPYYHAYAYWGQGTQVTVSS

SEQ ID NO: 38889 - protein, 118 aa, Artificial Sequence
  Chemically Synthesized
QVQLQESGGGLVQAGGSLRLSCAASGSISTDYFMGWYRQAPGKEREFVAAIGVGTTTYYADSVKGRFTISRDNAKNTVYLQMNSLKPEDTAVYYCAVWAWDPYPFVYWGQGTQVTVSS

SEQ ID NO: 38890 - protein, 118 aa, Artificial Sequence
  Chemically Synthesized
QVQLQESGGGLVQAGGSLRLSCAASGNISYDYQMGWYRQAPGKEREFVAGIAIGTITYYADSVKGRFTISRDNAKNTVYLQMNSLKPEDTAVYYCAVAYTWWDQHTYWGQGTQVTVSS

SEQ ID NO: 38891 - protein, 118 aa, Artificial Sequence
  Chemically Synthesized
QVQLQESGGGLVQAGGSLRLSCAASGTIFRDDYMGWYRQAPGKEREFVAGIANGTTTYYADSVKGRFTISRDNAKNTVYLQMNSLKPEDTAVYYCAAWSWGPYLYAYWGQGTQVTVSS

SEQ ID NO: 38892 - protein, 118 aa, Artificial Sequence
  Chemically Synthesized
QVQLQESGGGLVQAGGSLRLSCAASGYISQSDYMGWYRQAPGKEREFVAGINIGGNTYYADSVKGRFTISRDNAKNTVYLQMNSLKPEDTAVYYCAAVNWIYPQYAYWGQGTQVTVSS

SEQ ID NO: 38893 - protein, 117 aa, Artificial Sequence
  Chemically Synthesized
QVQLQESGGGLVQAGGSLRLSCAASGYIFTYPNMGWYRQAPGKEREFVASINGGGNTYYADSVKGRFTISRDNAKNTVYLQMNSLKPEDTAVYYCAVWDWGRDLVYWGQGTQVTVSS

SEQ ID NO: 38894 - protein, 118 aa, Artificial Sequence
  Chemically Synthesized
QVQLQESGGGLVQAGGSLRLSCAASGTISDYRYMGWYRQAPGKERELVAAIASGASTYYADSVKGRFTISRDNAKNTVYLQMNSLKPEDTAVYYCAAWDWDDHVYVYWGQGTQVTVSS

SEQ ID NO: 38895 - protein, 122 aa, Artificial Sequence
  Chemically Synthesized
QVQLQESGGGLVQAGGSLRLSCAASGTISDFYYMGWYRQAPGKEREFVATIAGGSITYYADSVKGRFTISRDNAKNTVYLQMNSLKPEDTAVYYCAAWVWGLERDDDGHVYWGQGTQVTVSS

SEQ ID NO: 38896 - protein, 118 aa, Artificial Sequence
  Chemically Synthesized
QVQLQESGGGLVQAGGSLRLSCAASGNIFDSGWMGWYRQAPGKERELVAAISWGSNTYYADSVKGRFTISRDNAKNTVYLQMNSLKPEDTAVYYCAAWDWDRTAYVYWGQGTQVTVSS

SEQ ID NO: 38897 - protein, 122 aa, Artificial Sequence
  Chemically Synthesized
QVQLQESGGGLVQAGGSLRLSCAASGYIFTYPVMGWYRQAPGKEREFVATISEGASTYYADSVKGRFTISRDNAKNTVYLQMNSLKPEDTAVYYCAVVDGAYDYYTGPYYYWGQGTQVTVSS

SEQ ID NO: 38898 - protein, 118 aa, Artificial Sequence
  Chemically Synthesized
QVQLQESGGGLVQAGGSLRLSCAASGYIFAGDFMGWYRQAPGKERELVAAISYGANTYYADSVKGRFTISRDNAKNTVYLQMNSLKPEDTAVYYCAAWRWGLDQYVYWGQGTQVTVSS

SEQ ID NO: 38899 - protein, 118 aa, Artificial Sequence
  Chemically Synthesized
QVQLQESGGGLVQAGGSLRLSCAASGSISKSGYMGWYRQAPGKERELVAAIGDGANTYYADSVKGRFTISRDNAKNTVYLQMNSLKPEDTAVYYCAARAWDENPYGYWGQGTQVTVSS

SEQ ID NO: 38900 - protein, 118 aa, Artificial Sequence
  Chemically Synthesized
QVQLQESGGGLVQAGGSLRLSCAASGSIFGSDYMGWYRQAPGKEREFVAAITYGANTYYADSVKGRFTISRDNAKNTVYLQMNSLKPEDTAVYYCAAWRWALRDYAYWGQGTQVTVSS

SEQ ID NO: 38901 - protein, 122 aa, Artificial Sequence
  Chemically Synthesized
QVQLQESGGGLVQAGGSLRLSCAASGTISDDYYMGWYRQAPGKERELVAGINNGGSTYYADSVKGRFTISRDNAKNTVYLQMNSLKPEDTAVYYCAARDWGQYTEYEGHAYWGQGTQVTVSS

SEQ ID NO: 38902 - protein, 118 aa, Artificial Sequence
  Chemically Synthesized
QVQLQESGGGLVQAGGSLRLSCAASGNIFQYDYMGWYRQAPGKERELVAGIAQGAITYYADSVKGRFTISRDNAKNTVYLQMNSLKPEDTAVYYCAARSWFPYQFGYWGQGTQVTVSS

SEQ ID NO: 38903 - protein, 117 aa, Artificial Sequence
  Chemically Synthesized
QVQLQESGGGLVQAGGSLRLSCAASGSISSSAWMGWYRQAPGKEREFVAAIASGGTTYYADSVKGRFTISRDNAKNTVYLQMNSLKPEDTAVYYCAAWSWTGLFVYWGQGTQVTVSS

SEQ ID NO: 38904 - protein, 122 aa, Artificial Sequence
  Chemically Synthesized
QVQLQESGGGLVQAGGSLRLSCAASGTISSYSIMGWYRQAPGKERELVAAIGNGGSTYYADSVKGRFTISRDNAKNTVYLQMNSLKPEDTAVYYCAAWSWGSQYDDSAYVYWGQGTQVTVSS

SEQ ID NO: 38905 - protein, 118 aa, Artificial Sequence
  Chemically Synthesized
QVQLQESGGGLVQAGGSLRLSCAASGTIFDPQYMGWYRQAPGKEREFVAAIDYGTNTYYADSVKGRFTISRDNAKNTVYLQMNSLKPEDTAVYYCAAWRWDPYDLVYWGQGTQVTVSS

SEQ ID NO: 38906 - protein, 118 aa, Artificial Sequence
  Chemically Synthesized
QVQLQESGGGLVQAGGSLRLSCAASGNIFDYYWMGWYRQAPGKERELVAGINVGGSTYYADSVKGRFTISRDNAKNTVYLQMNSLKPEDTAVYYCAAWSWGDAPFSYWGQGTQVTVSS

SEQ ID NO: 38907 - protein, 117 aa, Artificial Sequence
  Chemically Synthesized
QVQLQESGGGLVQAGGSLRLSCAASGNIFADRYMGWYRQAPGKERELVAAIGSGAITNYADSVKGRFTISRDNAKNTVYLQMNSLKPEDTAVYYCAVWNWEDYYAYWGQGTQVTVSS

SEQ ID NO: 38908 - protein, 118 aa, Artificial Sequence
  Chemically Synthesized
QVQLQESGGGLVQAGGSLRLSCAASGYISYDVYMGWYRQAPGKEREFVASIDVGTSTYYADSVKGRFTISRDNAKNTVYLQMNSLKPEDTAVYYCAVWRWDIPRLVYWGQGTQVTVSS

SEQ ID NO: 38909 - protein, 122 aa, Artificial Sequence
  Chemically Synthesized
QVQLQESGGGLVQAGGSLRLSCAASGYIFLDWYMGWYRQAPGKERELVAAIGIGSSTYYADSVKGRFTISRDNAKNTVYLQMNSLKPEDTAVYYCAAWTWGGQQDVRAYAYWGQGTQVTVSS

SEQ ID NO: 38910 - protein, 117 aa, Artificial Sequence
  Chemically Synthesized
QVQLQESGGGLVQAGGSLRLSCAASGSISEDYVMGWYRQAPGKEREFVAGIDYGSTTYYADSVKGRFTISRDNAKNTVYLQMNSLKPEDTAVYYCAAWSWHASLVYWGQGTQVTVSS

SEQ ID NO: 38911 - protein, 121 aa, Artificial Sequence
  Chemically Synthesized
QVQLQESGGGLVQAGGSLRLSCAASGYIFVTYMGWYRQAPGKERELVAAINRGSTTYYADSVKGRFTISRDNAKNTVYLQMNSLKPEDTAVYYCAALAYYDEAALGEHGYWGQGTQVTVSS

SEQ ID NO: 38912 - protein, 118 aa, Artificial Sequence
  Chemically Synthesized
QVQLQESGGGLVQAGGSLRLSCAASGTISQTYYMGWYRQAPGKEREFVATIGGGGITYYADSVKGRFTISRDNAKNTVYLQMNSLKPEDTAVYYCAVWDWDGVEFVYWGQGTQVTVSS

SEQ ID NO: 38913 - protein, 118 aa, Artificial Sequence
  Chemically Synthesized
QVQLQESGGGLVQAGGSLRLSCAASGTIFAHPYMGWYRQAPGKERELVAAITSGATTYYADSVKGRFTISRDNAKNTVYLQMNSLKPEDTAVYYCAAWAWYPYEYSYWGQGTQVTVSS

SEQ ID NO: 38914 - protein, 118 aa, Artificial Sequence
  Chemically Synthesized
QVQLQESGGGLVQAGGSLRLSCAASGNISQDSWMGWYRQAPGKEREFVASIGGGGTTYYADSVKGRFTISRDNAKNTVYLQMNSLKPEDTAVYYCAAWSWDVSPYVYWGQGTQVTVSS

SEQ ID NO: 38915 - protein, 118 aa, Artificial Sequence
  Chemically Synthesized
QVQLQESGGGLVQAGGSLRLSCAASGYISDVDYMGWYRQAPGKERELVATIAYGTITYYADSVKGRFTISRDNAKNTVYLQMNSLKPEDTAVYYCAAWSWRNDTYAYWGQGTQVTVSS

SEQ ID NO: 38916 - protein, 118 aa, Artificial Sequence
  Chemically Synthesized
QVQLQESGGGLVQAGGSLRLSCAASGTIFAWVYMGWYRQAPGKERELVAAITYGTNTYYADSVKGRFTISRDNAKNTVYLQMNSLKPEDTAVYYCAVWQWDPQAFVYWGQGTQVTVSS

SEQ ID NO: 38917 - protein, 118 aa, Artificial Sequence
  Chemically Synthesized
QVQLQESGGGLVQAGGSLRLSCAASGTIFRGTYMGWYRQAPGKEREFVAAISIGGNTYYADSVKGRFTISRDNAKNTVYLQMNSLKPEDTAVYYCAAWTWDGYQHAYWGQGTQVTVSS

SEQ ID NO: 38918 - protein, 118 aa, Artificial Sequence
  Chemically Synthesized
QVQLQESGGGLVQAGGSLRLSCAASGNISTYDYMGWYRQAPGKERELVAGIAKGATTYYADSVKGRFTISRDNAKNTVYLQMNSLKPEDTAVYYCAAVDQYIVGHAYWGQGTQVTVSS

SEQ ID NO: 38919 - protein, 118 aa, Artificial Sequence
  Chemically Synthesized
QVQLQESGGGLVQAGGSLRLSCAASGYISFYAYMGWYRQAPGKERELVAAITAGGTTNYADSVKGRFTISRDNAKNTVYLQMNSLKPEDTAVYYCAAWAWGDDAYAYWGQGTQVTVSS

SEQ ID NO: 38920 - protein, 121 aa, Artificial Sequence
  Chemically Synthesized
QVQLQESGGGLVQAGGSLRLSCAASGYISSDDYMGWYRQAPGKEREFVAAITYGATTYYADSVKGRFTISRDNAKNTVYLQMNSLKPEDTAVYYCAQWQWLTPSVPAYAYWGQGTQVTVSS

SEQ ID NO: 38921 - protein, 118 aa, Artificial Sequence
  Chemically Synthesized
QVQLQESGGGLVQAGGSLRLSCAASGNIFQYNGMGWYRQAPGKEREFVAGINNGSTTYYADSVKGRFTISRDNAKNTVYLQMNSLKPEDTAVYYCAAYRDWWDRLTYWGQGTQVTVSS

SEQ ID NO: 38922 - protein, 118 aa, Artificial Sequence
  Chemically Synthesized
QVQLQESGGGLVQAGGSLRLSCAASGSISEDPYMGWYRQAPGKERELVATISLGSSTYYADSVKGRFTISRDNAKNTVYLQMNSLKPEDTAVYYCAAWSWSPSRYVYWGQGTQVTVSS

SEQ ID NO: 38923 - protein, 118 aa, Artificial Sequence
  Chemically Synthesized
QVQLQESGGGLVQAGGSLRLSCAASGNISYRGNMGWYRQAPGKEREFVATIDGGSNTYYADSVKGRFTISRDNAKNTVYLQMNSLKPEDTAVYYCAVWAWGPSEFAYWGQGTQVTVSS

SEQ ID NO: 38924 - protein, 121 aa, Artificial Sequence
  Chemically Synthesized
QVQLQESGGGLVQAGGSLRLSCAASGNIFGDAYMGWYRQAPGKEREFVATIDYGATTYYADSVKGRFTISRDNAKNTVYLQMNSLKPEDTAVYYCAVWAWDETTDEPYAYWGQGTQVTVSS

SEQ ID NO: 38925 - protein, 117 aa, Artificial Sequence
  Chemically Synthesized
QVQLQESGGGLVQAGGSLRLSCAASGTIFSDYMGWYRQAPGKEREFVATIAVGSITYYADSVKGRFTISRDNAKNTVYLQMNSLKPEDTAVYYCAVWDASWADYAYWGQGTQVTVSS

SEQ ID NO: 38926 - protein, 118 aa, Artificial Sequence
  Chemically Synthesized
QVQLQESGGGLVQAGGSLRLSCAASGNIFSYDDMGWYRQAPGKERELVAAITTGTNTYYADSVKGRFTISRDNAKNTVYLQMNSLKPEDTAVYYCAVWSWNTPTHAYWGQGTQVTVSS

SEQ ID NO: 38927 - protein, 122 aa, Artificial Sequence
  Chemically Synthesized
QVQLQESGGGLVQAGGSLRLSCAASGTIFTADYMGWYRQAPGKEREFVAAIDAGSSTYYADSVKGRFTISRDNAKNTVYLQMNSLKPEDTAVYYCAAWAWAGNDDQSAYSYWGQGTQVTVSS

SEQ ID NO: 38928 - protein, 118 aa, Artificial Sequence
  Chemically Synthesized
QVQLQESGGGLVQAGGSLRLSCAASGYIFPTDHMGWYRQAPGKEREFVASITDGASTYYADSVKGRFTISRDNAKNTVYLQMNSLKPEDTAVYYCAVWNWNEDYYVYWGQGTQVTVSS

SEQ ID NO: 38929 - protein, 122 aa, Artificial Sequence
  Chemically Synthesized
QVQLQESGGGLVQAGGSLRLSCAASGNISASPWMGWYRQAPGKEREFVAGIDDGTTTYYADSVKGRFTISRDNAKNTVYLQMNSLKPEDTAVYYCAVWSWDYDEGRDGYAYWGQGTQVTVSS

SEQ ID NO: 38930 - protein, 117 aa, Artificial Sequence
  Chemically Synthesized
QVQLQESGGGLVQAGGSLRLSCAASGSISTSYRMGWYRQAPGKERELVASIGGGNTYYADSVKGRFTISRDNAKNTVYLQMNSLKPEDTAVYYCAAWGYGYPPHQYWGQGTQVTVSS

SEQ ID NO: 38931 - protein, 118 aa, Artificial Sequence
  Chemically Synthesized
QVQLQESGGGLVQAGGSLRLSCAASGSISRRGYMGWYRQAPGKERELVASIAAGANTYYADSVKGRFTISRDNAKNTVYLQMNSLKPEDTAVYYCAVWQWDWPWFAYWGQGTQVTVSS

SEQ ID NO: 38932 - protein, 118 aa, Artificial Sequence
  Chemically Synthesized
QVQLQESGGGLVQAGGSLRLSCAASGNISGWGWMGWYRQAPGKEREFVAAISYGSTTYYADSVKGRFTISRDNAKNTVYLQMNSLKPEDTAVYYCAAWAWDQGDYAYWGQGTQVTVSS

SEQ ID NO: 38933 - protein, 118 aa, Artificial Sequence
  Chemically Synthesized
QVQLQESGGGLVQAGGSLRLSCAASGTISQNEWMGWYRQAPGKERELVATISIGTTTYYADSVKGRFTISRDNAKNTVYLQMNSLKPEDTAVYYCAVWSWSEPTYGYWGQGTQVTVSS

SEQ ID NO: 38934 - protein, 117 aa, Artificial Sequence
  Chemically Synthesized
QVQLQESGGGLVQAGGSLRLSCAASGNISWAELMGWYRQAPGKERELVAAIDYGASTYYADSVKGRFTISRDNAKNTVYLQMNSLKPEDTAVYYCAAPYYERDLVYWGQGTQVTVSS

SEQ ID NO: 38935 - protein, 118 aa, Artificial Sequence
  Chemically Synthesized
QVQLQESGGGLVQAGGSLRLSCAASGNISVGEWMGWYRQAPGKERELVASITDGGSTYYADSVKGRFTISRDNAKNTVYLQMNSLKPEDTAVYYCAVWSWVYTPFAYWGQGTQVTVSS

SEQ ID NO: 38936 - protein, 118 aa, Artificial Sequence
  Chemically Synthesized
QVQLQESGGGLVQAGGSLRLSCAASGTISDGDYMGWYRQAPGKERELVAAIGYGTSTNYADSVKGRFTISRDNAKNTVYLQMNSLKPEDTAVYYCAVWRWTGIQYAYWGQGTQVTVSS

SEQ ID NO: 38937 - protein, 121 aa, Artificial Sequence
  Chemically Synthesized
QVQLQESGGGLVQAGGSLRLSCAASGSISDDPYMGWYRQAPGKERELVAAINLGAITYYADSVKGRFTISRDNAKNTVYLQMNSLKPEDTAVYYCAVWDWGESTDSQYAYWGQGTQVTVSS

SEQ ID NO: 38938 - protein, 118 aa, Artificial Sequence
  Chemically Synthesized
QVQLQESGGGLVQAGGSLRLSCAASGTIFDLDFMGWYRQAPGKEREFVAAIGSGSTTYYADSVKGRFTISRDNAKNTVYLQMNSLKPEDTAVYYCAAWKWDTNPFAYWGQGTQVTVSS

SEQ ID NO: 38939 - protein, 118 aa, Artificial Sequence
  Chemically Synthesized
QVQLQESGGGLVQAGGSLRLSCAASGNISKSEYMGWYRQAPGKEREFVAAIAIGGSTYYADSVKGRFTISRDNAKNTVYLQMNSLKPEDTAVYYCAAWQWENVYYAYWGQGTQVTVSS

SEQ ID NO: 38940 - protein, 118 aa, Artificial Sequence
  Chemically Synthesized
QVQLQESGGGLVQAGGSLRLSCAASGYIFGDDHMGWYRQAPGKEREFVAAIAQGTTTYYADSVKGRFTISRDNAKNTVYLQMNSLKPEDTAVYYCAVWRWYADTYAYWGQGTQVTVSS

SEQ ID NO: 38941 - protein, 122 aa, Artificial Sequence
  Chemically Synthesized
QVQLQESGGGLVQAGGSLRLSCAASGNISDVDYMGWYRQAPGKEREFVATIADGATTYYADSVKGRFTISRDNAKNTVYLQMNSLKPEDTAVYYCAVWAWQASDGARDYAYWGQGTQVTVSS

SEQ ID NO: 38942 - protein, 118 aa, Artificial Sequence
  Chemically Synthesized
QVQLQESGGGLVQAGGSLRLSCAASGNIFFISYMGWYRQAPGKERELVAGITQGTSTYYADSVKGRFTISRDNAKNTVYLQMNSLKPEDTAVYYCAVRSWRPVNRAYWGQGTQVTVSS

SEQ ID NO: 38943 - protein, 118 aa, Artificial Sequence
  Chemically Synthesized
QVQLQESGGGLVQAGGSLRLSCAASGTISDDIYMGWYRQAPGKEREFVAAISDGTSTYYADSVKGRFTISRDNAKNTVYLQMNSLKPEDTAVYYCAAWAWDPVGYDYWGQGTQVTVSS

SEQ ID NO: 38944 - protein, 118 aa, Artificial Sequence
  Chemically Synthesized
QVQLQESGGGLVQAGGSLRLSCAASGSISNYQYMGWYRQAPGKEREFVAGIGIGSSTYYADSVKGRFTISRDNAKNTVYLQMNSLKPEDTAVYYCAAIYDWEASYGYWGQGTQVTVSS

SEQ ID NO: 38945 - protein, 117 aa, Artificial Sequence
  Chemically Synthesized
QVQLQESGGGLVQAGGSLRLSCAASGSISLQYQMGWYRQAPGKEREFVASITRGSSTNYADSVKGRFTISRDNAKNTVYLQMNSLKPEDTAVYYCAADWDSYSRFYWGQGTQVTVSS

SEQ ID NO: 38946 - protein, 118 aa, Artificial Sequence
  Chemically Synthesized
QVQLQESGGGLVQAGGSLRLSCAASGSISADDTMGWYRQAPGKERELVAAIGYGSTTYYADSVKGRFTISRDNAKNTVYLQMNSLKPEDTAVYYCAVPYDYQYYLSYWGQGTQVTVSS

SEQ ID NO: 38947 - protein, 118 aa, Artificial Sequence
  Chemically Synthesized
QVQLQESGGGLVQAGGSLRLSCAASGYISAWSFMGWYRQAPGKEREFVAGINGGGITNYADSVKGRFTISRDNAKNTVYLQMNSLKPEDTAVYYCAAVTAFNYGLGYWGQGTQVTVSS

SEQ ID NO: 38948 - protein, 118 aa, Artificial Sequence
  Chemically Synthesized
QVQLQESGGGLVQAGGSLRLSCAASGNISDDDLMGWYRQAPGKEREFVATIDPGTNTYYADSVKGRFTISRDNAKNTVYLQMNSLKPEDTAVYYCAVWSWGYAPHVYWGQGTQVTVSS

SEQ ID NO: 38949 - protein, 118 aa, Artificial Sequence
  Chemically Synthesized
QVQLQESGGGLVQAGGSLRLSCAASGNIFRGWYMGWYRQAPGKEREFVATIASGGSTYYADSVKGRFTISRDNAKNTVYLQMNSLKPEDTAVYYCAVWDWEPGDYAYWGQGTQVTVSS

SEQ ID NO: 38950 - protein, 117 aa, Artificial Sequence
  Chemically Synthesized
QVQLQESGGGLVQAGGSLRLSCAASGTIFQYDYMGWYRQAPGKEREFVAAIAYGGNTNYADSVKGRFTISRDNAKNTVYLQMNSLKPEDTAVYYCAAWSWRRSRAYWGQGTQVTVSS

SEQ ID NO: 38951 - protein, 118 aa, Artificial Sequence
  Chemically Synthesized
QVQLQESGGGLVQAGGSLRLSCAASGYISRYDYMGWYRQAPGKERELVAAINSGASTYYADSVKGRFTISRDNAKNTVYLQMNSLKPEDTAVYYCAVRSWGLDDYAYWGQGTQVTVSS

SEQ ID NO: 38952 - protein, 117 aa, Artificial Sequence
  Chemically Synthesized
QVQLQESGGGLVQAGGSLRLSCAASGNIFTLRMGWYRQAPGKERELVASITTGTNTYYADSVKGRFTISRDNAKNTVYLQMNSLKPEDTAVYYCAAPDIGDYVYYYWGQGTQVTVSS

SEQ ID NO: 38953 - protein, 113 aa, Artificial Sequence
  Chemically Synthesized
QVQLQESGGGLVQAGGSLRLSCAASGNISGHVYMGWYRQAPGKERELVATIATGAITNYADSVKGRFTISRDNAKNTVYLQMNSLKPEDTAVYYCAVTILIYWGQGTQVTVSS

SEQ ID NO: 38954 - protein, 122 aa, Artificial Sequence
  Chemically Synthesized
QVQLQESGGGLVQAGGSLRLSCAASGYISYNFGMGWYRQAPGKERELVASISQGGTTNYADSVKGRFTISRDNAKNTVYLQMNSLKPEDTAVYYCARSTRRYYRPQTWLAYWGQGTQVTVSS

SEQ ID NO: 38955 - protein, 118 aa, Artificial Sequence
  Chemically Synthesized
QVQLQESGGGLVQAGGSLRLSCAASGNISATRYMGWYRQAPGKEREFVASIASGSSTQYADSVKGRFTISRDNAKNTVYLQMNSLKPEDTAVYYCAVDDNGTGHYVYWGQGTQVTVSS

SEQ ID NO: 38956 - protein, 118 aa, Artificial Sequence
  Chemically Synthesized
QVQLQESGGGLVQAGGSLRLSCAASGTIFPSRYMGWYRQAPGKERELVATISYGSSTYYADSVKGRFTISRDNAKNTVYLQMNSLKPEDTAVYYCAVGRRRGWLYGYWGQGTQVTVSS

SEQ ID NO: 38957 - protein, 118 aa, Artificial Sequence
  Chemically Synthesized
QVQLQESGGGLVQAGGSLRLSCAASGTISASLRMGWYRQAPGKEREFVATINLGSTTYYADSVKGRFTISRDNAKNTVYLQMNSLKPEDTAVYYCAVAYVYPDDLYYWGQGTQVTVSS

SEQ ID NO: 38958 - protein, 122 aa, Artificial Sequence
  Chemically Synthesized
QVQLQESGGGLVQAGGSLRLSCAASGTISRGATMGWYRQAPGKEREFVATISRGGTTNYADSVKGRFTISRDNAKNTVYLQMNSLKPEDTAVYYCAVQPGLRYLYYDDLDYWGQGTQVTVSS

SEQ ID NO: 38959 - protein, 122 aa, Artificial Sequence
  Chemically Synthesized
QVQLQESGGGLVQAGGSLRLSCAASGNISNWTTMGWYRQAPGKERELVATIDTGGTTYYADSVKGRFTISRDNAKNTVYLQMNSLKPEDTAVYYCAVALYVDYYKEPRHYYWGQGTQVTVSS

SEQ ID NO: 38960 - protein, 122 aa, Artificial Sequence
  Chemically Synthesized
QVQLQESGGGLVQAGGSLRLSCAASGYIFDSPHMGWYRQAPGKERELVAAIDYGSSTYYADSVKGRFTISRDNAKNTVYLQMNSLKPEDTAVYYCAVVDQPFQDDHFNLAYWGQGTQVTVSS

SEQ ID NO: 38961 - protein, 111 aa, Artificial Sequence
  Chemically Synthesized
QVQLQESGGGLVQAGGSLRLSCAASGYIFPPLLMGWYRQAPGKERELVAGITRGTSTNYADSVKGRFTISRDNAKNTVYLQMNSLKPEDTAVYYCAYLNYWGQGTQVTVSS

SEQ ID NO: 38962 - protein, 122 aa, Artificial Sequence
  Chemically Synthesized
QVQLQESGGGLVQAGGSLRLSCAASGSIFRALRMGWYRQAPGKERELVASITGGGITNYADSVKGRFTISRDNAKNTVYLQMNSLKPEDTAVYYCAAVYRYGYYRGPRHAYWGQGTQVTVSS

SEQ ID NO: 38963 - protein, 118 aa, Artificial Sequence
  Chemically Synthesized
QVQLQESGGGLVQAGGSLRLSCAASGSISVGDTMGWYRQAPGKERELVAGINRGSSTNYADSVKGRFTISRDNAKNTVYLQMNSLKPEDTAVYYCAVKIATAYDHDYWGQGTQVTVSS

SEQ ID NO: 38964 - protein, 122 aa, Artificial Sequence
  Chemically Synthesized
QVQLQESGGGLVQAGGSLRLSCAASGYIFSYVLMGWYRQAPGKEREFVAAIGVGSITYYADSVKGRFTISRDNAKNTVYLQMNSLKPEDTAVYYCAVGLPIDTGYVTDFDYWGQGTQVTVSS

SEQ ID NO: 38965 - protein, 118 aa, Artificial Sequence
  Chemically Synthesized
QVQLQESGGGLVQAGGSLRLSCAASGNISYKDVMGWYRQAPGKERELVAAITYGGNTNYADSVKGRFTISRDNAKNTVYLQMNSLKPEDTAVYYCAAATSRGKDHPYWGQGTQVTVSS

SEQ ID NO: 38966 - protein, 117 aa, Artificial Sequence
  Chemically Synthesized
QVQLQESGGGLVQAGGSLRLSCAASGSISRRYMGWYRQAPGKEREFVASIDRGASTYYADSVKGRFTISRDNAKNTVYLQMNSLKPEDTAVYYCAARRHVSNYYRYWGQGTQVTVSS

SEQ ID NO: 38967 - protein, 122 aa, Artificial Sequence
  Chemically Synthesized
QVQLQESGGGLVQAGGSLRLSCAASGTIFGDGSMGWYRQAPGKEREFVASIDTGTITYYADSVKGRFTISRDNAKNTVYLQMNSLKPEDTAVYYCAVYGYGQDEFWPAHAYWGQGTQVTVSS

SEQ ID NO: 38968 - protein, 122 aa, Artificial Sequence
  Chemically Synthesized
QVQLQESGGGLVQAGGSLRLSCAASGSIFRRLAMGWYRQAPGKEREFVAGIGTGASTNYADSVKGRFTISRDNAKNTVYLQMNSLKPEDTAVYYCAAYHGTGYGWRRGYWYWGQGTQVTVSS

SEQ ID NO: 38969 - protein, 118 aa, Artificial Sequence
  Chemically Synthesized
QVQLQESGGGLVQAGGSLRLSCAASGNIFRRPEMGWYRQAPGKERELVAGINYGASTYYADSVKGRFTISRDNAKNTVYLQMNSLKPEDTAVYYCAGSVLRWDRHYYWGQGTQVTVSS

SEQ ID NO: 38970 - protein, 118 aa, Artificial Sequence
  Chemically Synthesized
QVQLQESGGGLVQAGGSLRLSCAASGYIFRPWLMGWYRQAPGKEREFVATINYGGNTYYADSVKGRFTISRDNAKNTVYLQMNSLKPEDTAVYYCAVRRYYNYYYLYWGQGTQVTVSS

SEQ ID NO: 38971 - protein, 118 aa, Artificial Sequence
  Chemically Synthesized
QVQLQESGGGLVQAGGSLRLSCAASGNISYSYSMGWYRQAPGKEREFVATIAAGANTNYADSVKGRFTISRDNAKNTVYLQMNSLKPEDTAVYYCAVYYIYVGTYVYWGQGTQVTVSS

SEQ ID NO: 38972 - protein, 116 aa, Artificial Sequence
  Chemically Synthesized
QVQLQESGGGLVQAGGSLRLSCAASGTISPYSMGWYRQAPGKERELVATLITVLVPYADSVKGRFTISRDNAKNTVYLQMNSLKPEDTAVYYCAATTRDDVYYDYWGQGTQVTVSS

SEQ ID NO: 38973 - protein, 118 aa, Artificial Sequence
  Chemically Synthesized
QVQLQESGGGLVQAGGSLRLSCAASGSISYTRFMGWYRQAPGKERELVAGINYGTITYYADSVKGRFTISRDNAKNTVYLQMNSLKPEDTAVYYCAVRRRYSQVHYYWGQGTQVTVSS

SEQ ID NO: 38974 - protein, 118 aa, Artificial Sequence
  Chemically Synthesized
QVQLQESGGGLVQAGGSLRLSCAASGNISRPWGMGWYRQAPGKEREFVAAITPGSSTYYADSVKGRFTISRDNAKNTVYLQMNSLKPEDTAVYYCAARLRWRTTFVYWGQGTQVTVSS

SEQ ID NO: 38975 - protein, 118 aa, Artificial Sequence
  Chemically Synthesized
QVQLQESGGGLVQAGGSLRLSCAASGYISRYSVMGWYRQAPGKERELVAAITWGSNTYYADSVKGRFTISRDNAKNTVYLQMNSLKPEDTAVYYCAANRYHRDRHYYWGQGTQVTVSS

SEQ ID NO: 38976 - protein, 118 aa, Artificial Sequence
  Chemically Synthesized
QVQLQESGGGLVQAGGSLRLSCAASGNIFAWRYMGWYRQAPGKERELVASINSGGTTNYADSVKGRFTISRDNAKNTVYLQMNSLKPEDTAVYYCAVAHWPLWLHGYWGQGTQVTVSS

SEQ ID NO: 38977 - protein, 118 aa, Artificial Sequence
  Chemically Synthesized
QVQLQESGGGLVQAGGSLRLSCAASGNISYTRRMGWYRQAPGKEREFVASIAYGSITYYADSVKGRFTISRDNAKNTVYLQMNSLKPEDTAVYYCAARRYPRYGYYYWGQGTQVTVSS

SEQ ID NO: 38978 - protein, 117 aa, Artificial Sequence
  Chemically Synthesized
QVQLQESGGGLVQAGGSLRLSCAASGTISIIGYMGWYRQAPGKEREFVATIGGGTTYYADSVKGRFTISRDNAKNTVYLQMNSLKPEDTAVYYCAVDSYDDYIHGYWGQGTQVTVSS

SEQ ID NO: 38979 - protein, 118 aa, Artificial Sequence
  Chemically Synthesized
QVQLQESGGGLVQAGGSLRLSCAASGYIFVSLFMGWYRQAPGKEREFVAAITQGGTTYYADSVKGRFTISRDNAKNTVYLQMNSLKPEDTAVYYCAAWVYPAGVHYYWGQGTQVTVSS

SEQ ID NO: 38980 - protein, 118 aa, Artificial Sequence
  Chemically Synthesized
QVQLQESGGGLVQAGGSLRLSCAASGYISARKTMGWYRQAPGKERELVAAIGRGGTTYYADSVKGRFTISRDNAKNTVYLQMNSLKPEDTAVYYCAVRPLYVSQLRYWGQGTQVTVSS

SEQ ID NO: 38981 - protein, 118 aa, Artificial Sequence
  Chemically Synthesized
QVQLQESGGGLVQAGGSLRLSCAASGTIFTRRIMGWYRQAPGKERELVASITYGGNTNYADSVKGRFTISRDNAKNTVYLQMNSLKPEDTAVYYCAARRSTKTYFFYWGQGTQVTVSS

SEQ ID NO: 38982 - protein, 122 aa, Artificial Sequence
  Chemically Synthesized
QVQLQESGGGLVQAGGSLRLSCAASGYISPGLDMGWYRQAPGKERELVASISVGTNTYYADSVKGRFTISRDNAKNTVYLQMNSLKPEDTAVYYCAVGWWDEVEPYYALGYWGQGTQVTVSS

SEQ ID NO: 38983 - protein, 122 aa, Artificial Sequence
  Chemically Synthesized
QVQLQESGGGLVQAGGSLRLSCAASGTIFGYSEMGWYRQAPGKEREFVASISEGGSTYYADSVKGRFTISRDNAKNTVYLQMNSLKPEDTAVYYCAVRYPANVPGRADHTYWGQGTQVTVSS

SEQ ID NO: 38984 - protein, 122 aa, Artificial Sequence
  Chemically Synthesized
QVQLQESGGGLVQAGGSLRLSCAASGTISWRVRMGWYRQAPGKEREFVAAIGEGSNTYYADSVKGRFTISRDNAKNTVYLQMNSLKPEDTAVYYCAARYSVRWRYRPPYPYWGQGTQVTVSS

SEQ ID NO: 38985 - protein, 118 aa, Artificial Sequence
  Chemically Synthesized
QVQLQESGGGLVQAGGSLRLSCAASGNISTGAYMGWYRQAPGKEREFVAAISTGGSTYYADSVKGRFTISRDNAKNTVYLQMNSLKPEDTAVYYCAVQVDYGYYLYYWGQGTQVTVSS

SEQ ID NO: 38986 - protein, 118 aa, Artificial Sequence
  Chemically Synthesized
QVQLQESGGGLVQAGGSLRLSCAASGSISRPTWMGWYRQAPGKEREFVATIGYGTSTNYADSVKGRFTISRDNAKNTVYLQMNSLKPEDTAVYYCAVFLWRRYRFQYWGQGTQVTVSS

SEQ ID NO: 38987 - protein, 118 aa, Artificial Sequence
  Chemically Synthesized
QVQLQESGGGLVQAGGSLRLSCAASGYISYSPQMGWYRQAPGKERELVATINRGGTTNYADSVKGRFTISRDNAKNTVYLQMNSLKPEDTAVYYCAVIRRYHGRYSYWGQGTQVTVSS

SEQ ID NO: 38988 - protein, 122 aa, Artificial Sequence
  Chemically Synthesized
QVQLQESGGGLVQAGGSLRLSCAASGYIFETLYMGWYRQAPGKEREFVAAIAPGTSTYYADSVKGRFTISRDNAKNTVYLQMNSLKPEDTAVYYCAAHYYSVSQDDVFYAYWGQGTQVTVSS

SEQ ID NO: 38989 - protein, 118 aa, Artificial Sequence
  Chemically Synthesized
QVQLQESGGGLVQAGGSLRLSCAASGTISRIRRMGWYRQAPGKEREFVAAIAYGGNTNYADSVKGRFTISRDNAKNTVYLQMNSLKPEDTAVYYCAATYGRPWTHRYWGQGTQVTVSS

SEQ ID NO: 38990 - protein, 118 aa, Artificial Sequence
  Chemically Synthesized
QVQLQESGGGLVQAGGSLRLSCAASGSIFYDDAMGWYRQAPGKEREFVAGIGLGSITNYADSVKGRFTISRDNAKNTVYLQMNSLKPEDTAVYYCAVADQPAPWHEYWGQGTQVTVSS

SEQ ID NO: 38991 - protein, 118 aa, Artificial Sequence
  Chemically Synthesized
QVQLQESGGGLVQAGGSLRLSCAASGTIFRYYAMGWYRQAPGKEREFVAAIAHGATTNYADSVKGRFTISRDNAKNTVYLQMNSLKPEDTAVYYCAALRAYYTRYPYWGQGTQVTVSS

SEQ ID NO: 38992 - protein, 118 aa, Artificial Sequence
  Chemically Synthesized
QVQLQESGGGLVQAGGSLRLSCAASGSISRYKAMGWYRQAPGKERELVAAIARGANTYYADSVKGRFTISRDNAKNTVYLQMNSLKPEDTAVYYCAAPADYRSWHRYWGQGTQVTVSS

SEQ ID NO: 38993 - protein, 121 aa, Artificial Sequence
  Chemically Synthesized
QVQLQESGGGLVQAGGSLRLSCAASGSISYDFLMGWYRQAPGKERELVATISTVVVPYADSVKGRFTISRDNAKNTVYLQMNSLKPEDTAVYYCAAGLYYWSYLQGPHRYWGQGTQVTVSS

SEQ ID NO: 38994 - protein, 121 aa, Artificial Sequence
  Chemically Synthesized
QVQLQESGGGLVQAGGSLRLSCAASGYISYFRSMGWYRQAPGKEREFVATIGYGGTTNYADSVKGRFTISRDNAKNTVYLQMNSLKPEDTAVYYCALRKTGYAFQRLHGYWGQGTQVTVSS

SEQ ID NO: 38995 - protein, 118 aa, Artificial Sequence
  Chemically Synthesized
QVQLQESGGGLVQAGGSLRLSCAASGSIFYRYRMGWYRQAPGKEREFVAGIAKGSSTYYADSVKGRFTISRDNAKNTVYLQMNSLKPEDTAVYYCAARAYVYRYHPYWGQGTQVTVSS

SEQ ID NO: 38996 - protein, 126 aa, Artificial Sequence
  Chemically Synthesized
QVQLQESGGGLVQAGGSLRLSCAASGYISGRRYMGWYRQAPGKERELVAAIAYGATTNYADSVKGRFTISRDNAKNTVYLQMNSLKPEDTAVYYCAVPYRRRVSPTYHGYVPHTYWGQGTQVTVSS

SEQ ID NO: 38997 - protein, 118 aa, Artificial Sequence
  Chemically Synthesized
QVQLQESGGGLVQAGGSLRLSCAASGYISSPSYMGWYRQAPGKEREFVASITNGGNTYYADSVKGRFTISRDNAKNTVYLQMNSLKPEDTAVYYCAVLDQYSQYHPYWGQGTQVTVSS

SEQ ID NO: 38998 - protein, 116 aa, Artificial Sequence
  Chemically Synthesized
QVQLQESGGGLVQAGGSLRLSCAASGNIFETVMGWYRQAPGKEREFVAAISGGITYYADSVKGRFTISRDNAKNTVYLQMNSLKPEDTAVYYCAVLRTTGELHDYWGQGTQVTVSS

SEQ ID NO: 38999 - protein, 118 aa, Artificial Sequence
  Chemically Synthesized
QVQLQESGGGLVQAGGSLRLSCAASGYIFAYGDMGWYRQAPGKEREFVATIAYGASTNYADSVKGRFTISRDNAKNTVYLQMNSLKPEDTAVYYCAVDPDYPFDFTYWGQGTQVTVSS

SEQ ID NO: 39000 - protein, 126 aa, Artificial Sequence
  Chemically Synthesized
QVQLQESGGGLVQAGGSLRLSCAASGSISDYDNMGWYRQAPGKERELVAGISYGAITNYADSVKGRFTISRDNAKNTVYLQMNSLKPEDTAVYYCAAQTERRWTRYVLWYPYYDYWGQGTQVTVSS

SEQ ID NO: 39001 - protein, 111 aa, Artificial Sequence
  Chemically Synthesized
QVQLQESGGGLVQAGGSLRLSCAASGTIFDGYDMGWYRQAPGKERELVATIGKGGSTYYADSVKGRFTISRDNAKNTVYLQMNSLKPEDTAVYYCATCIYWGQGTQVTVSS

SEQ ID NO: 39002 - protein, 118 aa, Artificial Sequence
  Chemically Synthesized
QVQLQESGGGLVQAGGSLRLSCAASGTIFYIRHMGWYRQAPGKEREFVAGIAGGASTYYADSVKGRFTISRDNAKNTVYLQMNSLKPEDTAVYYCAAWKIRRDRLYYWGQGTQVTVSS

SEQ ID NO: 39003 - protein, 122 aa, Artificial Sequence
  Chemically Synthesized
QVQLQESGGGLVQAGGSLRLSCAASGNIFDASYMGWYRQAPGKERELVATINYGATTYYADSVKGRFTISRDNAKNTVYLQMNSLKPEDTAVYYCAAYSYDDGLTWSALVYWGQGTQVTVSS

SEQ ID NO: 39004 - protein, 122 aa, Artificial Sequence
  Chemically Synthesized
QVQLQESGGGLVQAGGSLRLSCAASGTIFGYRRMGWYRQAPGKERELVAGIARGGNTNYADSVKGRFTISRDNAKNTVYLQMNSLKPEDTAVYYCAAGRKVYGGAYFSHAYWGQGTQVTVSS

SEQ ID NO: 39005 - protein, 125 aa, Artificial Sequence
  Chemically Synthesized
QVQLQESGGGLVQAGGSLRLSCAASGSIFTSLMGWYRQAPGKEREFVATINWGSSTNYADSVKGRFTISRDNAKNTVYLQMNSLKPEDTAVYYCAVATDVDYDDTWYIAGDFAYWGQGTQVTVSS

SEQ ID NO: 39006 - protein, 115 aa, Artificial Sequence
  Chemically Synthesized
QVQLQESGGGLVQAGGSLRLSCAASGYIFWYWRMGWYRQAPGKEREFVAAITYGSTTNYADSVKGRFTISRDNAKNTVYLQMNSLKPEDTAVYYCAAYRRGYGYWGQGTQVTVSS

SEQ ID NO: 39007 - protein, 125 aa, Artificial Sequence
  Chemically Synthesized
QVQLQESGGGLVQAGGSLRLSCAASGNISGTSPMGWYRQAPGKEREFVAGIGNGANTYYADSVKGRFTISRDNAKNTVYLQMNSLKPEDTAVYYCAAYNDDPYTLYPNYRTDLYWGQGTQVTVSS

SEQ ID NO: 39008 - protein, 122 aa, Artificial Sequence
  Chemically Synthesized
QVQLQESGGGLVQAGGSLRLSCAASGNISADYYMGWYRQAPGKEREFVASINTGGTTYYADSVKGRFTISRDNAKNTVYLQMNSLKPEDTAVYYCAAAAGGDPWVDDGHDYWGQGTQVTVSS

SEQ ID NO: 39009 - protein, 114 aa, Artificial Sequence
  Chemically Synthesized
QVQLQESGGGLVQAGGSLRLSCAASGILLMGWYRQAPGKEREFVATITGGSITYYADSVKGRFTISRDNAKNTVYLQMNSLKPEDTAVYYCAARGYYAYPLGYWGQGTQVTVSS

SEQ ID NO: 39010 - protein, 108 aa, Artificial Sequence
  Chemically Synthesized
QVQLQESGGGLVQAGGSLRLSCAASGTISPLSTMGWYRQAPGKERELVAAIDDGTTNYADSVKGRFTISRDNAKNTVYLQMNSLKPEDTAVYYCAVYWGQGTQVTVSS

SEQ ID NO: 39011 - protein, 126 aa, Artificial Sequence
  Chemically Synthesized
QVQLQESGGGLVQAGGSLRLSCAASGYISNANFMGWYRQAPGKEREFVAAISYGTTTYYADSVKGRFTISRDNAKNTVYLQMNSLKPEDTAVYYCAADLFGDWTTYRLPHPSHQYWGQGTQVTVSS

SEQ ID NO: 39012 - protein, 110 aa, Artificial Sequence
  Chemically Synthesized
QVQLQESGGGLVQAGGSLRLSCAASGYISPWYSMGWYRQAPGKEREFVASINGGATTYYADSVKGRFTISRDNAKNTVYLQMNSLKPEDTAVYYCAVLYWGQGTQVTVSS

SEQ ID NO: 39013 - protein, 118 aa, Artificial Sequence
  Chemically Synthesized
QVQLQESGGGLVQAGGSLRLSCAASGTIFPGQYMGWYRQAPGKEREFVAAISTGGTTYYADSVKGRFTISRDNAKNTVYLQMNSLKPEDTAVYYCAAGSPWGWRHFYWGQGTQVTVSS

SEQ ID NO: 39014 - protein, 126 aa, Artificial Sequence
  Chemically Synthesized
QVQLQESGGGLVQAGGSLRLSCAASGSISDYTLMGWYRQAPGKERELVASIDVGASTYYADSVKGRFTISRDNAKNTVYLQMNSLKPEDTAVYYCAVIYWYHAYDHLVYQSAHPYWGQGTQVTVSS

SEQ ID NO: 39015 - protein, 118 aa, Artificial Sequence
  Chemically Synthesized
QVQLQESGGGLVQAGGSLRLSCAASGTISPDIYMGWYRQAPGKERELVAGIDYGSTTNYADSVKGRFTISRDNAKNTVYLQMNSLKPEDTAVYYCAVKDTQFQDFRYWGQGTQVTVSS

SEQ ID NO: 39016 - protein, 122 aa, Artificial Sequence
  Chemically Synthesized
QVQLQESGGGLVQAGGSLRLSCAASGTISGRTYMGWYRQAPGKEREFVAGIDKGTITYYADSVKGRFTISRDNAKNTVYLQMNSLKPEDTAVYYCAAYYSYEADEPDDFSYWGQGTQVTVSS

SEQ ID NO: 39017 - protein, 116 aa, Artificial Sequence
  Chemically Synthesized
QVQLQESGGGLVQAGGSLRLSCAASGSIFAVTDMGWYRQAPGKERELVAAIGDGGSTYYADSVKGRFTISRDNAKNTVYLQMNSLKPEDTAVYYCAVDSSTTSLYWGQGTQVTVSS

SEQ ID NO: 39018 - protein, 118 aa, Artificial Sequence
  Chemically Synthesized
QVQLQESGGGLVQAGGSLRLSCAASGTIFYGLAMGWYRQAPGKEREFVASIGSGSITNYADSVKGRFTISRDNAKNTVYLQMNSLKPEDTAVYYCAVWYRFRHAHSYWGQGTQVTVSS

SEQ ID NO: 39019 - protein, 118 aa, Artificial Sequence
  Chemically Synthesized
QVQLQESGGGLVQAGGSLRLSCAASGTIFVYDGMGWYRQAPGKERELVASIAVGAITNYADSVKGRFTISRDNAKNTVYLQMNSLKPEDTAVYYCAVDWFDQYALGYWGQGTQVTVSS

SEQ ID NO: 39020 - protein, 122 aa, Artificial Sequence
  Chemically Synthesized
QVQLQESGGGLVQAGGSLRLSCAASGNISHDDNMGWYRQAPGKEREFVATIAGWCYYQYADSVKGRFTISRDNAKNTVYLQMNSLKPEDTAVYYCAAYRYATVVSISGHYYWGQGTQVTVSS

SEQ ID NO: 39021 - protein, 118 aa, Artificial Sequence
  Chemically Synthesized
QVQLQESGGGLVQAGGSLRLSCAASGTIFVVQYMGWYRQAPGKERELVAAINKGSITYYADSVKGRFTISRDNAKNTVYLQMNSLKPEDTAVYYCAVDYLPDGPHDYWGQGTQVTVSS

SEQ ID NO: 39022 - protein, 119 aa, Artificial Sequence
  Chemically Synthesized
QVQLQESGGGLVQAGGSLRLSCAASGNISQDEDMGWYRQAPGKEREFVATISSVVLPYADSVKGRFTISRDNAKNTVYLQMNSLKPEDTAVYYCAAVGWGYILDNYDYWGQGTQVTVSS

SEQ ID NO: 39023 - protein, 121 aa, Artificial Sequence
  Chemically Synthesized
QVQLQESGGGLVQAGGSLRLSCAASGNIFSFYYMGWYRQAPGKERELVASISRGATTYYADSVKGRFTISRDNAKNTVYLQMNSLKPEDTAVYYCAVNYNQYAYYRQLNYWGQGTQVTVSS

SEQ ID NO: 39024 - protein, 126 aa, Artificial Sequence
  Chemically Synthesized
QVQLQESGGGLVQAGGSLRLSCAASGTISYTYIMGWYRQAPGKERELVATITDGAITNYADSVKGRFTISRDNAKNTVYLQMNSLKPEDTAVYYCAVGTGYHYDISKHHTWPFVYWGQGTQVTVSS

SEQ ID NO: 39025 - protein, 118 aa, Artificial Sequence
  Chemically Synthesized
QVQLQESGGGLVQAGGSLRLSCAASGNISQRGFMGWYRQAPGKERELVATITRGSSTYYADSVKGRFTISRDNAKNTVYLQMNSLKPEDTAVYYCAADNYVSDRFPYWGQGTQVTVSS

SEQ ID NO: 39026 - protein, 121 aa, Artificial Sequence
  Chemically Synthesized
QVQLQESGGGLVQAGGSLRLSCAASGSIFTLYYMGWYRQAPGKEREFVAAIASVVLPYADSVKGRFTISRDNAKNTVYLQMNSLKPEDTAVYYCAAYPDSGVNGDTTYEYWGQGTQVTVSS

SEQ ID NO: 39027 - protein, 122 aa, Artificial Sequence
  Chemically Synthesized
QVQLQESGGGLVQAGGSLRLSCAASGTIFPLVYMGWYRQAPGKERELVAAIGEGSNTYYADSVKGRFTISRDNAKNTVYLQMNSLKPEDTAVYYCAAVPYVVADYDRGFYYWGQGTQVTVSS

SEQ ID NO: 39028 - protein, 122 aa, Artificial Sequence
  Chemically Synthesized
QVQLQESGGGLVQAGGSLRLSCAASGNISTSDVMGWYRQAPGKERELVASINAGTSTYYADSVKGRFTISRDNAKNTVYLQMNSLKPEDTAVYYCAAGHGHALRDFGNHSYWGQGTQVTVSS

SEQ ID NO: 39029 - protein, 116 aa, Artificial Sequence
  Chemically Synthesized
QVQLQESGGGLVQAGGSLRLSCAASGNIFSLLMGWYRQAPGKERELVAGIGNGSITYYADSVKGRFTISRDNAKNTVYLQMNSLKPEDTAVYYCAASTTLRTTLYWGQGTQVTVSS

SEQ ID NO: 39030 - protein, 117 aa, Artificial Sequence
  Chemically Synthesized
QVQLQESGGGLVQAGGSLRLSCAASGTISDYVRMGWYRQAPGKEREFVAAIGSGGTTNYADSVKGRFTISRDNAKNTVYLQMNSLKPEDTAVYYCAATVSTLLVLYWGQGTQVTVSS

SEQ ID NO: 39031 - protein, 113 aa, Artificial Sequence
  Chemically Synthesized
QVQLQESGGGLVQAGGSLRLSCAASGTIFVYDHMGWYRQAPGKERELVATISGGTTNYADSVKGRFTISRDNAKNTVYLQMNSLKPEDTAVYYCAVPYDLRYWGQGTQVTVSS

SEQ ID NO: 39032 - protein, 118 aa, Artificial Sequence
  Chemically Synthesized
QVQLQESGGGLVQAGGSLRLSCAASGSIFFEPYMGWYRQAPGKEREFVASIASGGTTNYADSVKGRFTISRDNAKNTVYLQMNSLKPEDTAVYYCAAYVYLTGPLRYWGQGTQVTVSS

SEQ ID NO: 39033 - protein, 121 aa, Artificial Sequence
  Chemically Synthesized
QVQLQESGGGLVQAGGSLRLSCAASGTISSDDGMGWYRQAPGKERELVAGISRGTSTYYADSVKGRFTISRDNAKNTVYLQMNSLKPEDTAVYYCAAPARYPYYDYSHRYWGQGTQVTVSS

SEQ ID NO: 39034 - protein, 126 aa, Artificial Sequence
  Chemically Synthesized
QVQLQESGGGLVQAGGSLRLSCAASGYIFVAYYMGWYRQAPGKEREFVAAITSGATTNYADSVKGRFTISRDNAKNTVYLQMNSLKPEDTAVYYCAADQYQYKYYTPTGGPGFYYWGQGTQVTVSS

SEQ ID NO: 39035 - protein, 118 aa, Artificial Sequence
  Chemically Synthesized
QVQLQESGGGLVQAGGSLRLSCAASGTISNAGGMGWYRQAPGKERELVAGISYGTITYYADSVKGRFTISRDNAKNTVYLQMNSLKPEDTAVYYCAVQPAYDTFYFYWGQGTQVTVSS

SEQ ID NO: 39036 - protein, 122 aa, Artificial Sequence
  Chemically Synthesized
QVQLQESGGGLVQAGGSLRLSCAASGTISYVDSMGWYRQAPGKEREFVASINTGTSTYYADSVKGRFTISRDNAKNTVYLQMNSLKPEDTAVYYCAAQRAYIPFYYPLHFYWGQGTQVTVSS

SEQ ID NO: 39037 - protein, 118 aa, Artificial Sequence
  Chemically Synthesized
QVQLQESGGGLVQAGGSLRLSCAASGTISIDDGMGWYRQAPGKEREFVAAINAGTITYYADSVKGRFTISRDNAKNTVYLQMNSLKPEDTAVYYCAVFDYYYTDHGYWGQGTQVTVSS

SEQ ID NO: 39038 - protein, 118 aa, Artificial Sequence
  Chemically Synthesized
QVQLQESGGGLVQAGGSLRLSCAASGYISQTGEMGWYRQAPGKERELVAAIATGGTTYYADSVKGRFTISRDNAKNTVYLQMNSLKPEDTAVYYCAVVQDDGLDLEYWGQGTQVTVSS

SEQ ID NO: 39039 - protein, 122 aa, Artificial Sequence
  Chemically Synthesized
QVQLQESGGGLVQAGGSLRLSCAASGNISDYTHMGWYRQAPGKERELVASIGGGTITNYADSVKGRFTISRDNAKNTVYLQMNSLKPEDTAVYYCAVIGYLGPYPYTDHLYWGQGTQVTVSS

SEQ ID NO: 39040 - protein, 118 aa, Artificial Sequence
  Chemically Synthesized
QVQLQESGGGLVQAGGSLRLSCAASGYIFDQYNMGWYRQAPGKEREFVAGIARGGNTYYADSVKGRFTISRDNAKNTVYLQMNSLKPEDTAVYYCAVRQYDDYGYGYWGQGTQVTVSS

SEQ ID NO: 39041 - protein, 118 aa, Artificial Sequence
  Chemically Synthesized
QVQLQESGGGLVQAGGSLRLSCAASGYIFAAGDMGWYRQAPGKEREFVAGIDYGTSTYYADSVKGRFTISRDNAKNTVYLQMNSLKPEDTAVYYCAVRYYATYYHYYWGQGTQVTVSS

SEQ ID NO: 39042 - protein, 119 aa, Artificial Sequence
  Chemically Synthesized
QVQLQESGGGLVQAGGSLRLSCAASGYIFRGSYAMGWYRQAPGKEREFVAGIAYGTTTYYADSVKGRFTISRDNAKNTVYLQMNSLKPEDTAVYYCAVLADPRKRHSYWGQGTQVTVSS

SEQ ID NO: 39043 - protein, 118 aa, Artificial Sequence
  Chemically Synthesized
QVQLQESGGGLVQAGGSLRLSCAASGNISYDYYMGWYRQAPGKEREFVAGINVGAITYYADSVKGRFTISRDNAKNTVYLQMNSLKPEDTAVYYCAVLILDDYYHDYWGQGTQVTVSS

SEQ ID NO: 39044 - protein, 118 aa, Artificial Sequence
  Chemically Synthesized
QVQLQESGGGLVQAGGSLRLSCAASGSISYRNVMGWYRQAPGKERELVAAIDDGTSTYYADSVKGRFTISRDNAKNTVYLQMNSLKPEDTAVYYCAAFWDVYSYHVYWGQGTQVTVSS

SEQ ID NO: 39045 - protein, 122 aa, Artificial Sequence
  Chemically Synthesized
QVQLQESGGGLVQAGGSLRLSCAASGSIFPPAYMGWYRQAPGKEREFVAGIDAGTSTYYADSVKGRFTISRDNAKNTVYLQMNSLKPEDTAVYYCAALYHKQDRAQPWHDYWGQGTQVTVSS

SEQ ID NO: 39046 - protein, 120 aa, Artificial Sequence
  Chemically Synthesized
QVQLQESGGGLVQAGGSLRLSCAASGSISTGLMGWYRQAPGKEREFVAGIADGGNYYADSVKGRFTISRDNAKNTVYLQMNSLKPEDTAVYYCAVRARYDVGYIRYYDYWGQGTQVTVSS

SEQ ID NO: 39047 - protein, 118 aa, Artificial Sequence
  Chemically Synthesized
QVQLQESGGGLVQAGGSLRLSCAASGNISSRQYMGWYRQAPGKEREFVAGIGYGSNTYYADSVKGRFTISRDNAKNTVYLQMNSLKPEDTAVYYCAVIVYQGAWYDYWGQGTQVTVSS

SEQ ID NO: 39048 - protein, 121 aa, Artificial Sequence
  Chemically Synthesized
QVQLQESGGGLVQAGGSLRLSCAASGNISDTQPMGWYRQAPGKEREFVAGIARGSTYYADSVKGRFTISRDNAKNTVYLQMNSLKPEDTAVYYCAVRRVGENQRDPTYDYWGQGTQVTVSS

SEQ ID NO: 39049 - protein, 118 aa, Artificial Sequence
  Chemically Synthesized
QVQLQESGGGLVQAGGSLRLSCAASGTISQYAAMGWYRQAPGKERELVAAIGDGSITYYADSVKGRFTISRDNAKNTVYLQMNSLKPEDTAVYYCAVYYLYDPYYPYWGQGTQVTVSS

SEQ ID NO: 39050 - protein, 122 aa, Artificial Sequence
  Chemically Synthesized
QVQLQESGGGLVQAGGSLRLSCAASGTISDYLVMGWYRQAPGKERELVASITYGTTTYYADSVKGRFTISRDNAKNTVYLQMNSLKPEDTAVYYCAAVRYYYGRWTRGFTYWGQGTQVTVSS

SEQ ID NO: 39051 - protein, 118 aa, Artificial Sequence
  Chemically Synthesized
QVQLQESGGGLVQAGGSLRLSCAASGSISYNDPMGWYRQAPGKERELVAAIDDGSSTYYADSVKGRFTISRDNAKNTVYLQMNSLKPEDTAVYYCAVYVRYSSYHPYWGQGTQVTVSS

SEQ ID NO: 39052 - protein, 118 aa, Artificial Sequence
  Chemically Synthesized
QVQLQESGGGLVQAGGSLRLSCAASGNISAIDYMGWYRQAPGKEREFVAGISKGGSTYYADSVKGRFTISRDNAKNTVYLQMNSLKPEDTAVYYCAALDLAWGGHDYWGQGTQVTVSS

SEQ ID NO: 39053 - protein, 126 aa, Artificial Sequence
  Chemically Synthesized
QVQLQESGGGLVQAGGSLRLSCAASGSISYPDYMGWYRQAPGKEREFVAGISYGSNTYYADSVKGRFTISRDNAKNTVYLQMNSLKPEDTAVYYCAVRNLGLRPDNEEWRQLHGYWGQGTQVTVSS

SEQ ID NO: 39054 - protein, 118 aa, Artificial Sequence
  Chemically Synthesized
QVQLQESGGGLVQAGGSLRLSCAASGTIFGFYLMGWYRQAPGKERELVAAIDYGSITYYADSVKGRFTISRDNAKNTVYLQMNSLKPEDTAVYYCAAYAQGGEFLDYWGQGTQVTVSS

SEQ ID NO: 39055 - protein, 122 aa, Artificial Sequence
  Chemically Synthesized
QVQLQESGGGLVQAGGSLRLSCAASGNISSPGYMGWYRQAPGKEREFVAGINPGTTTYYADSVKGRFTISRDNAKNTVYLQMNSLKPEDTAVYYCAVLYVYLDGPDDYLDYWGQGTQVTVSS

SEQ ID NO: 39056 - protein, 119 aa, Artificial Sequence
  Chemically Synthesized
QVQLQESGGGLVQAGGSLRLSCAASGYIFHDPVMGWYRQAPGKERELVAAIADGATTYYADSVKGRFTISRDNAKNTVYLQMNSLKPEDTAVYYCAAYDWPSQRGFLYWGQGTQVTVSS

SEQ ID NO: 39057 - protein, 118 aa, Artificial Sequence
  Chemically Synthesized
QVQLQESGGGLVQAGGSLRLSCAASGNISYLYLMGWYRQAPGKEREFVAGIAKGANTYYADSVKGRFTISRDNAKNTVYLQMNSLKPEDTAVYYCAVYDGDPDYLDYWGQGTQVTVSS

SEQ ID NO: 39058 - protein, 122 aa, Artificial Sequence
  Chemically Synthesized
QVQLQESGGGLVQAGGSLRLSCAASGYIFTYGYMGWYRQAPGKEREFVAGISFGASTYYADSVKGRFTISRDNAKNTVYLQMNSLKPEDTAVYYCAALIVKDTDGYAWYDYWGQGTQVTVSS

SEQ ID NO: 39059 - protein, 122 aa, Artificial Sequence
  Chemically Synthesized
QVQLQESGGGLVQAGGSLRLSCAASGNISEPDVMGWYRQAPGKERELVAGIDAGGSTYYADSVKGRFTISRDNAKNTVYLQMNSLKPEDTAVYYCAVWYIDTEYAYLDFFYWGQGTQVTVSS

SEQ ID NO: 39060 - protein, 118 aa, Artificial Sequence
  Chemically Synthesized
QVQLQESGGGLVQAGGSLRLSCAASGTISHAKRMGWYRQAPGKEREFVATITLGANTYYADSVKGRFTISRDNAKNTVYLQMNSLKPEDTAVYYCAARYGFRDYYLYWGQGTQVTVSS

SEQ ID NO: 39061 - protein, 116 aa, Artificial Sequence
  Chemically Synthesized
QVQLQESGGGLVQAGGSLRLSCAASGTISQYAAMGWYRQAPGKEREFVAGIAYGTSTYYADSVKGRFTISRDNAKNTVYLQMNSLKPEDTAVYYCAVLTRYGYDYWGQGTQVTVSS

SEQ ID NO: 39062 - protein, 122 aa, Artificial Sequence
  Chemically Synthesized
QVQLQESGGGLVQAGGSLRLSCAASGSISSLYAMGWYRQAPGKEREFVAGIAYGGTTYYADSVKGRFTISRDNAKNTVYLQMNSLKPEDTAVYYCAVRDQESYPYGPWYDYWGQGTQVTVSS

SEQ ID NO: 39063 - protein, 118 aa, Artificial Sequence
  Chemically Synthesized
QVQLQESGGGLVQAGGSLRLSCAASGSISTYDYMGWYRQAPGKEREFVAGINPGTITYYADSVKGRFTISRDNAKNTVYLQMNSLKPEDTAVYYCAALLHEYTWHDYWGQGTQVTVSS

SEQ ID NO: 39064 - protein, 118 aa, Artificial Sequence
  Chemically Synthesized
QVQLQESGGGLVQAGGSLRLSCAASGSISDVSAMGWYRQAPGKEREFVAGIAYGGTTYYADSVKGRFTISRDNAKNTVYLQMNSLKPEDTAVYYCAVLLHTAGYHDYWGQGTQVTVSS

SEQ ID NO: 39065 - protein, 118 aa, Artificial Sequence
  Chemically Synthesized
QVQLQESGGGLVQAGGSLRLSCAASGYISQRYYMGWYRQAPGKEREFVAGISDGTTTYYADSVKGRFTISRDNAKNTVYLQMNSLKPEDTAVYYCAVLTWADTYHDYWGQGTQVTVSS

SEQ ID NO: 39066 - protein, 118 aa, Artificial Sequence
  Chemically Synthesized
QVQLQESGGGLVQAGGSLRLSCAASGNIFSLGYMGWYRQAPGKEREFVAGIDDGTTTYYADSVKGRFTISRDNAKNTVYLQMNSLKPEDTAVYYCAALETWPTWHDYWGQGTQVTVSS

SEQ ID NO: 39067 - protein, 122 aa, Artificial Sequence
  Chemically Synthesized
QVQLQESGGGLVQAGGSLRLSCAASGYISDAPYMGWYRQAPGKEREFVAGIDEGSSTYYADSVKGRFTISRDNAKNTVYLQMNSLKPEDTAVYYCAALYYDGEGDHLWFDYWGQGTQVTVSS

SEQ ID NO: 39068 - protein, 124 aa, Artificial Sequence
  Chemically Synthesized
QVQLQESGGGLVQAGGSLRLSCAASGNIFAWKGMGWYRQAPGKERELVAAIADGTSTNYADSVKGRFTISRDNAKNTVYLQMNSLKPEDTAVYYCAVYYIAFVGSYDIRTFAYWGQGTQVTVSS

SEQ ID NO: 39069 - protein, 118 aa, Artificial Sequence
  Chemically Synthesized
QVQLQESGGGLVQAGGSLRLSCAASGYISVAKYMGWYRQAPGKEREFVAGIDNGASTYYADSVKGRFTISRDNAKNTVYLQMNSLKPEDTAVYYCAALDITDNWHSYWGQGTQVTVSS

SEQ ID NO: 39070 - protein, 118 aa, Artificial Sequence
  Chemically Synthesized
QVQLQESGGGLVQAGGSLRLSCAASGSISSYVAMGWYRQAPGKERELVASISHGANTNYADSVKGRFTISRDNAKNTVYLQMNSLKPEDTAVYYCAAIAYSYGYLFYWGQGTQVTVSS

SEQ ID NO: 39071 - protein, 118 aa, Artificial Sequence
  Chemically Synthesized
QVQLQESGGGLVQAGGSLRLSCAASGSISRIYTMGWYRQAPGKERELVASINYGAITNYADSVKGRFTISRDNAKNTVYLQMNSLKPEDTAVYYCAAWDDTDTQLQYWGQGTQVTVSS

SEQ ID NO: 39072 - protein, 118 aa, Artificial Sequence
  Chemically Synthesized
QVQLQESGGGLVQAGGSLRLSCAASGNIFAIRYMGWYRQAPGKEREFVAGIDDGGSTYYADSVKGRFTISRDNAKNTVYLQMNSLKPEDTAVYYCAVLAYWYRYYDYWGQGTQVTVSS

SEQ ID NO: 39073 - protein, 118 aa, Artificial Sequence
  Chemically Synthesized
QVQLQESGGGLVQAGGSLRLSCAASGYISVVDYMGWYRQAPGKEREFVAGIADGANTYYADSVKGRFTISRDNAKNTVYLQMNSLKPEDTAVYYCAALIVHPYVHDYWGQGTQVTVSS

SEQ ID NO: 39074 - protein, 118 aa, Artificial Sequence
  Chemically Synthesized
QVQLQESGGGLVQAGGSLRLSCAASGTISYFYRMGWYRQAPGKEREFVAAIGHGGNTNYADSVKGRFTISRDNAKNTVYLQMNSLKPEDTAVYYCAAVAARDRILGYWGQGTQVTVSS

SEQ ID NO: 39075 - protein, 118 aa, Artificial Sequence
  Chemically Synthesized
QVQLQESGGGLVQAGGSLRLSCAASGNIFYFRYMGWYRQAPGKEREFVAAIGNGSSTNYADSVKGRFTISRDNAKNTVYLQMNSLKPEDTAVYYCAAIKTQNSPHYYWGQGTQVTVSS

SEQ ID NO: 39076 - protein, 118 aa, Artificial Sequence
  Chemically Synthesized
QVQLQESGGGLVQAGGSLRLSCAASGTIFPVYYMGWYRQAPGKERELVASIGEGASTYYADSVKGRFTISRDNAKNTVYLQMNSLKPEDTAVYYCAAYPRDWSDLYYWGQGTQVTVSS

SEQ ID NO: 39077 - protein, 125 aa, Artificial Sequence
  Chemically Synthesized
QVQLQESGGGLVQAGGSLRLSCAASGTISHVYAMGWYRQAPGKEREFVATIGSGGSTNYADSVKGRFTISRDNAKNTVYLQMNSLKPEDTAVYYCAAWARPYRVVSTSSGTVIYWGQGTQVTVSS

SEQ ID NO: 39078 - protein, 118 aa, Artificial Sequence
  Chemically Synthesized
QVQLQESGGGLVQAGGSLRLSCAASGTISYIGNMGWYRQAPGKEREFVATINHGTTTNYADSVKGRFTISRDNAKNTVYLQMNSLKPEDTAVYYCAVVAGLATLYRYWGQGTQVTVSS

SEQ ID NO: 39079 - protein, 118 aa, Artificial Sequence
  Chemically Synthesized
QVQLQESGGGLVQAGGSLRLSCAASGSISADDAMGWYRQAPGKERELVAAIGDGASTNYADSVKGRFTISRDNAKNTVYLQMNSLKPEDTAVYYCAVFGDGYLYHTYWGQGTQVTVSS

SEQ ID NO: 39080 - protein, 122 aa, Artificial Sequence
  Chemically Synthesized
QVQLQESGGGLVQAGGSLRLSCAASGYISDPWLMGWYRQAPGKERELVAAIAYGSSTYYADSVKGRFTISRDNAKNTVYLQMNSLKPEDTAVYYCAVYALPDYRDGEYFDYWGQGTQVTVSS

SEQ ID NO: 39081 - protein, 122 aa, Artificial Sequence
  Chemically Synthesized
QVQLQESGGGLVQAGGSLRLSCAASGYISTSNYMGWYRQAPGKEREFVATINIGGSTYYADSVKGRFTISRDNAKNTVYLQMNSLKPEDTAVYYCAVYGLNSYTDVYDFAYWGQGTQVTVSS

SEQ ID NO: 39082 - protein, 116 aa, Artificial Sequence
  Chemically Synthesized
QVQLQESGGGLVQAGGSLRLSCAASGYIFQTDTMGWYRQAPGKERELVAAIDTGVVPYADSVKGRFTISRDNAKNTVYLQMNSLKPEDTAVYYCAAYATYDYHGYWGQGTQVTVSS

SEQ ID NO: 39083 - protein, 123 aa, Artificial Sequence
  Chemically Synthesized
QVQLQESGGGLVQAGGSLRLSCAASGSIFDYYSMGWYRQAPGKEREFVAGINTGGSTTNYADSVKGRFTISRDNAKNTVYLQMNSLKPEDTAVYYCAALTAAVDRYDTWHAYWGQGTQVTVSS

SEQ ID NO: 39084 - protein, 121 aa, Artificial Sequence
  Chemically Synthesized
QVQLQESGGGLVQAGGSLRLSCAASGNIFPRLYMGWYRQAPGKEREFVASITIGTITNYADSVKGRFTISRDNAKNTVYLQMNSLKPEDTAVYYCAVGWEPPSCLVLIMYWGQGTQVTVSS

SEQ ID NO: 39085 - protein, 122 aa, Artificial Sequence
  Chemically Synthesized
QVQLQESGGGLVQAGGSLRLSCAASGTIFTLWSMGWYRQAPGKEREFVAAIGYGGTTNYADSVKGRFTISRDNAKNTVYLQMNSLKPEDTAVYYCAVLDVQDDDWGRYHYYWGQGTQVTVSS

SEQ ID NO: 39086 - protein, 118 aa, Artificial Sequence
  Chemically Synthesized
QVQLQESGGGLVQAGGSLRLSCAASGYISFHWVMGWYRQAPGKERELVASIAEGGNTNYADSVKGRFTISRDNAKNTVYLQMNSLKPEDTAVYYCAVYPTQRNGHYYWGQGTQVTVSS

SEQ ID NO: 39087 - protein, 118 aa, Artificial Sequence
  Chemically Synthesized
QVQLQESGGGLVQAGGSLRLSCAASGTISAYGVMGWYRQAPGKEREFVASIDSGGNTYYADSVKGRFTISRDNAKNTVYLQMNSLKPEDTAVYYCAAIRRSSRVFYYWGQGTQVTVSS

SEQ ID NO: 39088 - protein, 117 aa, Artificial Sequence
  Chemically Synthesized
QVQLQESGGGLVQAGGSLRLSCAASGNISYHYVMGWYRQAPGKERELLPLLLTVVLPYADSVKGRFTISRDNAKNTVYLQMNSLKPEDTAVYYCAAYGDGTYVHLYWGQGTQVTVSS

SEQ ID NO: 39089 - protein, 121 aa, Artificial Sequence
  Chemically Synthesized
QVQLQESGGGLVQAGGSLRLSCAASGIFLLLLMGWYRQAPGKEREFVASIAPGANTNYADSVKGRFTISRDNAKNTVYLQMNSLKPEDTAVYYCAAAWPQTSGSSQWHDYWGQGTQVTVSS

SEQ ID NO: 39090 - protein, 126 aa, Artificial Sequence
  Chemically Synthesized
QVQLQESGGGLVQAGGSLRLSCAASGYISSALDMGWYRQAPGKEREFVASIGDGTSTNYADSVKGRFTISRDNAKNTVYLQMNSLKPEDTAVYYCAALIAWQDYSSVGDAGPLWYWGQGTQVTVSS

SEQ ID NO: 39091 - protein, 118 aa, Artificial Sequence
  Chemically Synthesized
QVQLQESGGGLVQAGGSLRLSCAASGTISTTDFMGWYRQAPGKEREFVATIAEGTTTNYADSVKGRFTISRDNAKNTVYLQMNSLKPEDTAVYYCAAGYDSKYVLKYWGQGTQVTVSS

SEQ ID NO: 39092 - protein, 126 aa, Artificial Sequence
  Chemically Synthesized
QVQLQESGGGLVQAGGSLRLSCAASGNIFIDAYMGWYRQAPGKEREFVAGIAYGASTYYADSVKGRFTISRDNAKNTVYLQMNSLKPEDTAVYYCAALYYDSPADRDNQGVWLDYWGQGTQVTVSS

SEQ ID NO: 39093 - protein, 117 aa, Artificial Sequence
  Chemically Synthesized
QVQLQESGGGLVQAGGSLRLSCAASGTISYDPYMGWYRQAPGKERELVLVVLPYADSVKGRFTISRDNAKNTVYLQMNSLKPEDTAVYYCAATIDYNYRDDYGYGYWGQGTQVTVSS

SEQ ID NO: 39094 - protein, 118 aa, Artificial Sequence
  Chemically Synthesized
QVQLQESGGGLVQAGGSLRLSCAASGNIFYYDYMGWYRQAPGKEREFVAGIATGGTTYYADSVKGRFTISRDNAKNTVYLQMNSLKPEDTAVYYCAALSLHYYIHDYWGQGTQVTVSS

SEQ ID NO: 39095 - protein, 117 aa, Artificial Sequence
  Chemically Synthesized
QVQLQESGGGLVQAGGSLRLSCAASGTISYSIVMGWYRQAPGKEREFVAAIGYGRLPYADSVKGRFTISRDNAKNTVYLQMNSLKPEDTAVYYCAALPWFQVRLTYWGQGTQVTVSS

SEQ ID NO: 39096 - protein, 118 aa, Artificial Sequence
  Chemically Synthesized
QVQLQESGGGLVQAGGSLRLSCAASGYIFVGNPMGWYRQAPGKEREFVAGITTGASTYYADSVKGRFTISRDNAKNTVYLQMNSLKPEDTAVYYCAARVYDERYFYYWGQGTQVTVSS

SEQ ID NO: 39097 - protein, 118 aa, Artificial Sequence
  Chemically Synthesized
QVQLQESGGGLVQAGGSLRLSCAASGSISDPRVMGWYRQAPGKEREFVAGISPGGNTNYADSVKGRFTISRDNAKNTVYLQMNSLKPEDTAVYYCAVVAFENGWHNYWGQGTQVTVSS

SEQ ID NO: 39098 - protein, 118 aa, Artificial Sequence
  Chemically Synthesized
QVQLQESGGGLVQAGGSLRLSCAASGTISYREPMGWYRQAPGKEREFVASISGGGTTYYADSVKGRFTISRDNAKNTVYLQMNSLKPEDTAVYYCAAITSYDGYHYYWGQGTQVTVSS

SEQ ID NO: 39099 - protein, 115 aa, Artificial Sequence
  Chemically Synthesized
QVQLQESGGGLVQAGGSLRLSCAASGLFLTLSMGWYRQAPGKERELVATINYGTNTYYADSVKGRFTISRDNAKNTVYLQMNSLKPEDTAVYYCAAYYDDDLHYWGQGTQVTVSS

SEQ ID NO: 39100 - protein, 121 aa, Artificial Sequence
  Chemically Synthesized
QVQLQESGGGLVQAGGSLRLSCAASGTISDLQYMGWYRQAPGKEREFVAAIATVVLPYADSVKGRFTISRDNAKNTVYLQMNSLKPEDTAVYYCAVLAFTRDGVQDDYLYWGQGTQVTVSS

SEQ ID NO: 39101 - protein, 117 aa, Artificial Sequence
  Chemically Synthesized
QVQLQESGGGLVQAGGSLRLSCAASGTISGDYAMGWYRQAPGKERELVAAIAHGGSTYYADSVKGRFTISRDNAKNTVYLQMNSLKPEDTAVYYCAARRYTSDPHYWGQGTQVTVSS

SEQ ID NO: 39102 - protein, 117 aa, Artificial Sequence
  Chemically Synthesized
QVQLQESGGGLVQAGGSLRLSCAASGYISYLSMGWYRQAPGKEREFVAAIDYGTNTYYADSVKGRFTISRDNAKNTVYLQMNSLKPEDTAVYYCAAYAIQDRGHYYWGQGTQVTVSS

SEQ ID NO: 39103 - protein, 125 aa, Artificial Sequence
  Chemically Synthesized
QVQLQESGGGLVQAGGSLRLSCAASGYISGQIDMGWYRQAPGKERELVATIDVVLIPYADSVKGRFTISRDNAKNTVYLQMNSLKPEDTAVYYCAADDSTDPSEDDTHGPLHYYWGQGTQVTVSS

SEQ ID NO: 39104 - protein, 122 aa, Artificial Sequence
  Chemically Synthesized
QVQLQESGGGLVQAGGSLRLSCAASGNISDPRTMGWYRQAPGKERELVAGIAAGGITYYADSVKGRFTISRDNAKNTVYLQMNSLKPEDTAVYYCAVVSQTNYHSPALFSYWGQGTQVTVSS

SEQ ID NO: 39105 - protein, 120 aa, Artificial Sequence
  Chemically Synthesized
QVQLQESGGGLVQAGGSLRLSCAASGSTCYRMGWYRQAPGKEREFVAGIDGGSTTYYADSVKGRFTISRDNAKNTVYLQMNSLKPEDTAVYYCAVYAWAYTVGTTKHTYWGQGTQVTVSS

SEQ ID NO: 39106 - protein, 122 aa, Artificial Sequence
  Chemically Synthesized
QVQLQESGGGLVQAGGSLRLSCAASGTISQLSNMGWYRQAPGKEREFVAAIDQGSTTNYADSVKGRFTISRDNAKNTVYLQMNSLKPEDTAVYYCAADDYYVWDGDKSHYYWGQGTQVTVSS

SEQ ID NO: 39107 - protein, 118 aa, Artificial Sequence
  Chemically Synthesized
QVQLQESGGGLVQAGGSLRLSCAASGNISDSFFMGWYRQAPGKERELVAAIANGTNTNYADSVKGRFTISRDNAKNTVYLQMNSLKPEDTAVYYCAVYYGQLVYYFYWGQGTQVTVSS

SEQ ID NO: 39108 - protein, 117 aa, Artificial Sequence
  Chemically Synthesized
QVQLQESGGGLVQAGGSLRLSCAASGNISYNLMGWYRQAPGKERELVATIGYGSNTYYADSVKGRFTISRDNAKNTVYLQMNSLKPEDTAVYYCAVGDNDDYDYGYWGQGTQVTVSS

SEQ ID NO: 39109 - protein, 122 aa, Artificial Sequence
  Chemically Synthesized
QVQLQESGGGLVQAGGSLRLSCAASGTISPVSDMGWYRQAPGKERELVASIGKGSNTNYADSVKGRFTISRDNAKNTVYLQMNSLKPEDTAVYYCAAYSDEHTGHRWYLNYWGQGTQVTVSS

SEQ ID NO: 39110 - protein, 118 aa, Artificial Sequence
  Chemically Synthesized
QVQLQESGGGLVQAGGSLRLSCAASGTIFGDYGMGWYRQAPGKEREFVAGIAYGTSTNYADSVKGRFTISRDNAKNTVYLQMNSLKPEDTAVYYCAAFLDYDSDYAYWGQGTQVTVSS

SEQ ID NO: 39111 - protein, 122 aa, Artificial Sequence
  Chemically Synthesized
QVQLQESGGGLVQAGGSLRLSCAASGSISADQLMGWYRQAPGKERELVATIAYGGTTNYADSVKGRFTISRDNAKNTVYLQMNSLKPEDTAVYYCAVWDGNYSRSDLYLAYWGQGTQVTVSS

SEQ ID NO: 39112 - protein, 126 aa, Artificial Sequence
  Chemically Synthesized
QVQLQESGGGLVQAGGSLRLSCAASGYISHGQHMGWYRQAPGKEREFVASINAGSTTNYADSVKGRFTISRDNAKNTVYLQMNSLKPEDTAVYYCAAEGDRNNNSRYVPYRRHQYWGQGTQVTVSS

SEQ ID NO: 39113 - protein, 121 aa, Artificial Sequence
  Chemically Synthesized
QVQLQESGGGLVQAGGSLRLSCAASGNISSYTDMGWYRQAPGKERELVATISYGASTNYADSVKGRFTISRDNAKNTVYLQMNSLKPEDTAVYYCAVPSTKLVTVGRTFYWGQGTQVTVSS

SEQ ID NO: 39114 - protein, 118 aa, Artificial Sequence
  Chemically Synthesized
QVQLQESGGGLVQAGGSLRLSCAASGYISDTYGMGWYRQAPGKERELVASISFGSITYYADSVKGRFTISRDNAKNTVYLQMNSLKPEDTAVYYCAAIYVYDPNYTYWGQGTQVTVSS

SEQ ID NO: 39115 - protein, 118 aa, Artificial Sequence
  Chemically Synthesized
QVQLQESGGGLVQAGGSLRLSCAASGYISHVWIMGWYRQAPGKERELVAQYADSVKGRFTISRDNAKNTVYLQMNSLKPEDTAVYYCAVAGYIAPPQVDSHVIRYTYWGQGTQVTVSS

SEQ ID NO: 39116 - protein, 122 aa, Artificial Sequence
  Chemically Synthesized
QVQLQESGGGLVQAGGSLRLSCAASGYISYPWYMGWYRQAPGKEREFVAAINDGGTTNYADSVKGRFTISRDNAKNTVYLQMNSLKPEDTAVYYCAAYYYWYNSTEAYYPYWGQGTQVTVSS

SEQ ID NO: 39117 - protein, 118 aa, Artificial Sequence
  Chemically Synthesized
QVQLQESGGGLVQAGGSLRLSCAASGNIFGASYMGWYRQAPGKEREFVAGITSGASTNYADSVKGRFTISRDNAKNTVYLQMNSLKPEDTAVYYCAVYDYYQPSLVYWGQGTQVTVSS

SEQ ID NO: 39118 - protein, 118 aa, Artificial Sequence
  Chemically Synthesized
QVQLQESGGGLVQAGGSLRLSCAASGYIFAVQDMGWYRQAPGKERELVAAIGSGGNTYYADSVKGRFTISRDNAKNTVYLQMNSLKPEDTAVYYCAAHAYVGGQFSYWGQGTQVTVSS

SEQ ID NO: 39119 - protein, 118 aa, Artificial Sequence
  Chemically Synthesized
QVQLQESGGGLVQAGGSLRLSCAASGNIFDTSYMGWYRQAPGKEREFVALLLWVVLPYADSVKGRFTISRDNAKNTVYLQMNSLKPEDTAVYYCAVRAWYSAYVYDYWGQGTQVTVSS

SEQ ID NO: 39120 - protein, 118 aa, Artificial Sequence
  Chemically Synthesized
QVQLQESGGGLVQAGGSLRLSCAASGTISGHVGMGWYRQAPGKERELVATIDYGSTTNYADSVKGRFTISRDNAKNTVYLQMNSLKPEDTAVYYCAVRYPLDPSHRYWGQGTQVTVSS

SEQ ID NO: 39121 - protein, 124 aa, Artificial Sequence
  Chemically Synthesized
QVQLQESGGGLVQAGGSLRLSCAASGTIFVLLMGWYRQAPGKEREFVAAIGDGANTYYADSVKGRFTISRDNAKNTVYLQMNSLKPEDTAVYYCAVTYVVITNLSSTSCVVIYWGQGTQVTVSS

SEQ ID NO: 39122 - protein, 125 aa, Artificial Sequence
  Chemically Synthesized
QVQLQESGGGLVQAGGSLRLSCAASGTIFGPYYMGWYRQAPGKEREFVATIDDGASTNYADSVKGRFTISRDNAKNTVYLQMNSLKPEDTAVYYCAAYQRASTLTKSTLLVVMYWGQGTQVTVSS

SEQ ID NO: 39123 - protein, 118 aa, Artificial Sequence
  Chemically Synthesized
QVQLQESGGGLVQAGGSLRLSCAASGTIFYGTSMGWYRQAPGKERELVASIAGGSNTNYADSVKGRFTISRDNAKNTVYLQMNSLKPEDTAVYYCAVGYAYVDGFSYWGQGTQVTVSS

SEQ ID NO: 39124 - protein, 116 aa, Artificial Sequence
  Chemically Synthesized
QVQLQESGGGLVQAGGSLRLSCAASGTISSVTMGWYRQAPGKERELVAAISTGSITYYADSVKGRFTISRDNAKNTVYLQMNSLKPEDTAVYYCAAYIDIASTMYWGQGTQVTVSS

SEQ ID NO: 39125 - protein, 118 aa, Artificial Sequence
  Chemically Synthesized
QVQLQESGGGLVQAGGSLRLSCAASGYIFPTQDMGWYRQAPGKEREFVAGISKGGITYYADSVKGRFTISRDNAKNTVYLQMNSLKPEDTAVYYCAVNDYTYTSLNYWGQGTQVTVSS

SEQ ID NO: 39126 - protein, 116 aa, Artificial Sequence
  Chemically Synthesized
QVQLQESGGGLVQAGGSLRLSCAASGYISQGHPMGWYRQAPGKERELVATIASVVLPYADSVKGRFTISRDNAKNTVYLQMNSLKPEDTAVYYCAADLTSVTNIYWGQGTQVTVSS

SEQ ID NO: 39127 - protein, 117 aa, Artificial Sequence
  Chemically Synthesized
QVQLQESGGGLVQAGGSLRLSCAASGNISDLHSMGWYRQAPGKERELVAAIDYGTITNYADSVKGRFTISRDNAKNTVYLQMNSLKPEDTAVYYCAADLTVLTTFYWGQGTQVTVSS

SEQ ID NO: 39128 - protein, 122 aa, Artificial Sequence
  Chemically Synthesized
QVQLQESGGGLVQAGGSLRLSCAASGTIFITTRMGWYRQAPGKERELVAAIDDGTSTYYADSVKGRFTISRDNAKNTVYLQMNSLKPEDTAVYYCAAVKWWLGQDISPFYYWGQGTQVTVSS

SEQ ID NO: 39129 - protein, 125 aa, Artificial Sequence
  Chemically Synthesized
QVQLQESGGGLVQAGGSLRLSCAASGNISYNRMGWYRQAPGKEREFVAAIADGTSTYYADSVKGRFTISRDNAKNTVYLQMNSLKPEDTAVYYCAVQDYGSYYTAYGEASGLNYWGQGTQVTVSS

SEQ ID NO: 39130 - protein, 116 aa, Artificial Sequence
  Chemically Synthesized
QVQLQESGGGLVQAGGSLRLSCAASGTISRPSVMGWYRQAPGKEREFVAGITYGGNTNYADSVKGRFTISRDNAKNTVYLQMNSLKPEDTAVYYCAAGISRGWGYWGQGTQVTVSS

SEQ ID NO: 39131 - protein, 122 aa, Artificial Sequence
  Chemically Synthesized
QVQLQESGGGLVQAGGSLRLSCAASGYISRRGYMGWYRQAPGKEREFVAAIGYGGTTYYADSVKGRFTISRDNAKNTVYLQMNSLKPEDTAVYYCAATLYPVATDYGELRYWGQGTQVTVSS

SEQ ID NO: 39132 - protein, 118 aa, Artificial Sequence
  Chemically Synthesized
QVQLQESGGGLVQAGGSLRLSCAASGNIFHLIYMGWYRQAPGKERELVATISYGGSTNYADSVKGRFTISRDNAKNTVYLQMNSLKPEDTAVYYCAVPSYWVGLFNYWGQGTQVTVSS

SEQ ID NO: 39133 - protein, 122 aa, Artificial Sequence
  Chemically Synthesized
QVQLQESGGGLVQAGGSLRLSCAASGYISGVLGMGWYRQAPGKERELVAAIGRGGTTYYADSVKGRFTISRDNAKNTVYLQMNSLKPEDTAVYYCAVLRGRRAGGYKYHYYWGQGTQVTVSS

SEQ ID NO: 39134 - protein, 122 aa, Artificial Sequence
  Chemically Synthesized
QVQLQESGGGLVQAGGSLRLSCAASGNIFDLPFMGWYRQAPGKERELVASIDQGGITYYADSVKGRFTISRDNAKNTVYLQMNSLKPEDTAVYYCAVLVGSVELYPQDHIYWGQGTQVTVSS

SEQ ID NO: 39135 - protein, 118 aa, Artificial Sequence
  Chemically Synthesized
QVQLQESGGGLVQAGGSLRLSCAASGTISRDTLMGWYRQAPGKERELVATINGGGNTYYADSVKGRFTISRDNAKNTVYLQMNSLKPEDTAVYYCAADDHIRWDLYYWGQGTQVTVSS

SEQ ID NO: 39136 - protein, 122 aa, Artificial Sequence
  Chemically Synthesized
QVQLQESGGGLVQAGGSLRLSCAASGTISYRGDMGWYRQAPGKERELVATITLGSSTNYADSVKGRFTISRDNAKNTVYLQMNSLKPEDTAVYYCAVPAYTYTGPLSQLYYWGQGTQVTVSS

SEQ ID NO: 39137 - protein, 118 aa, Artificial Sequence
  Chemically Synthesized
QVQLQESGGGLVQAGGSLRLSCAASGNISGLYHMGWYRQAPGKERELVAGISYGGTTYYADSVKGRFTISRDNAKNTVYLQMNSLKPEDTAVYYCAVNWLSDQPLYYWGQGTQVTVSS

SEQ ID NO: 39138 - protein, 118 aa, Artificial Sequence
  Chemically Synthesized
QVQLQESGGGLVQAGGSLRLSCAASGSISRDEGMGWYRQAPGKEREFVAAISEGGNTYYADSVKGRFTISRDNAKNTVYLQMNSLKPEDTAVYYCAAPYWGRYDLVYWGQGTQVTVSS

SEQ ID NO: 39139 - protein, 122 aa, Artificial Sequence
  Chemically Synthesized
QVQLQESGGGLVQAGGSLRLSCAASGTIFAVLYMGWYRQAPGKERELVAGIGFGGNTNYADSVKGRFTISRDNAKNTVYLQMNSLKPEDTAVYYCAAPLVYTQYIDTYHEYWGQGTQVTVSS

SEQ ID NO: 39140 - protein, 117 aa, Artificial Sequence
  Chemically Synthesized
QVQLQESGGGLVQAGGSLRLSCAASGNISYTYMGWYRQAPGKEREFVAAITPGSTTNYADSVKGRFTISRDNAKNTVYLQMNSLKPEDTAVYYCAVELDYTRHLAYWGQGTQVTVSS

SEQ ID NO: 39141 - protein, 118 aa, Artificial Sequence
  Chemically Synthesized
QVQLQESGGGLVQAGGSLRLSCAASGTIFRVTYMGWYRQAPGKEREFVAAIGRGSTTYYADSVKGRFTISRDNAKNTVYLQMNSLKPEDTAVYYCAAYAYLITPYAYWGQGTQVTVSS

SEQ ID NO: 39142 - protein, 118 aa, Artificial Sequence
  Chemically Synthesized
QVQLQESGGGLVQAGGSLRLSCAASGTIFGTYLMGWYRQAPGKERELVATITHGATTNYADSVKGRFTISRDNAKNTVYLQMNSLKPEDTAVYYCAVYTSACSVFYYWGQGTQVTVSS

SEQ ID NO: 39143 - protein, 117 aa, Artificial Sequence
  Chemically Synthesized
QVQLQESGGGLVQAGGSLRLSCAASGTIFNSLPMGWYRQAPGKERELVAGISIGSSTNYADSVKGRFTISRDNAKNTVYLQMNSLKPEDTAVYYCAVTLLLWLVLYWGQGTQVTVSS

SEQ ID NO: 39144 - protein, 118 aa, Artificial Sequence
  Chemically Synthesized
QVQLQESGGGLVQAGGSLRLSCAASGTIFLVTVMGWYRQAPGKERELVATIGTGSTTNYADSVKGRFTISRDNAKNTVYLQMNSLKPEDTAVYYCAVDDGLDDAYYYWGQGTQVTVSS

SEQ ID NO: 39145 - protein, 121 aa, Artificial Sequence
  Chemically Synthesized
QVQLQESGGGLVQAGGSLRLSCAASGYISVYHDMGWYRQAPGKEREFVATITYGGNTNYADSVKGRFTISRDNAKNTVYLQMNSLKPEDTAVYYCAAQGVSTTTLTTVIYWGQGTQVTVSS

SEQ ID NO: 39146 - protein, 121 aa, Artificial Sequence
  Chemically Synthesized
QVQLQESGGGLVQAGGSLRLSCAASGYILTLTMGWYRQAPGKERELVASIAEGATTYYADSVKGRFTISRDNAKNTVYLQMNSLKPEDTAVYYCAADLYSGQLSYFRLTYWGQGTQVTVSS

SEQ ID NO: 39147 - protein, 118 aa, Artificial Sequence
  Chemically Synthesized
QVQLQESGGGLVQAGGSLRLSCAASGSISRIRTMGWYRQAPGKERELVATIDYGSSTNYADSVKGRFTISRDNAKNTVYLQMNSLKPEDTAVYYCAAYTRWRVRYGYWGQGTQVTVSS

SEQ ID NO: 39148 - protein, 122 aa, Artificial Sequence
  Chemically Synthesized
QVQLQESGGGLVQAGGSLRLSCAASGTIFSIQYMGWYRQAPGKERELVAAIGTGGNTYYADSVKGRFTISRDNAKNTVYLQMNSLKPEDTAVYYCAVDLGLRNPDYRDHYYWGQGTQVTVSS

SEQ ID NO: 39149 - protein, 122 aa, Artificial Sequence
  Chemically Synthesized
QVQLQESGGGLVQAGGSLRLSCAASGTIFRSADMGWYRQAPGKEREFVATIASGGSTNYADSVKGRFTISRDNAKNTVYLQMNSLKPEDTAVYYCAAEAQGGLYRAEAHPYWGQGTQVTVSS

SEQ ID NO: 39150 - protein, 118 aa, Artificial Sequence
  Chemically Synthesized
QVQLQESGGGLVQAGGSLRLSCAASGNISSNLVMGWYRQAPGKERELVASITGGSSTYYADSVKGRFTISRDNAKNTVYLQMNSLKPEDTAVYYCAAHGRAKPRFDYWGQGTQVTVSS

SEQ ID NO: 39151 - protein, 122 aa, Artificial Sequence
  Chemically Synthesized
QVQLQESGGGLVQAGGSLRLSCAASGTISRNPRMGWYRQAPGKEREFVAGIGAGSITNYADSVKGRFTISRDNAKNTVYLQMNSLKPEDTAVYYCAVQRWASRALTSRHNYWGQGTQVTVSS

SEQ ID NO: 39152 - protein, 117 aa, Artificial Sequence
  Chemically Synthesized
QVQLQESGGGLVQAGGSLRLSCAASGNISSVWSMGWYRQAPGKERELVAAIAYGGTTYYADSVKGRFTISRDNAKNTVYLQMNSLKPEDTAVYYCAVRDGYGSLMYWGQGTQVTVSS

SEQ ID NO: 39153 - protein, 115 aa, Artificial Sequence
  Chemically Synthesized
QVQLQESGGGLVQAGGSLRLSCAASGTIFRTAGMGWYRQAPGKEREFVAGIAPGAITNYADSVKGRFTISRDNAKNTVYLQMNSLKPEDTAVYYCAAADDSLAYWGQGTQVTVSS

SEQ ID NO: 39154 - protein, 114 aa, Artificial Sequence
  Chemically Synthesized
QVQLQESGGGLVQAGGSLRLSCAASGYIFISTMGWYRQAPGKEREFVASIDTGAITNYADSVKGRFTISRDNAKNTVYLQMNSLKPEDTAVYYCAAVYYQYAYWGQGTQVTVSS

SEQ ID NO: 39155 - protein, 118 aa, Artificial Sequence
  Chemically Synthesized
QVQLQESGGGLVQAGGSLRLSCAASGNISLYTTMGWYRQAPGKEREFVATINLGGTTNYADSVKGRFTISRDNAKNTVYLQMNSLKPEDTAVYYCAVTPYPNDVFPYWGQGTQVTVSS

SEQ ID NO: 39156 - protein, 121 aa, Artificial Sequence
  Chemically Synthesized
QVQLQESGGGLVQAGGSLRLSCAASGSISHTSSMGWYRQAPGKERELVATIGPGTTTNYADSVKGRFTISRDNAKNTVYLQMNSLKPEDTAVYYCAASYALPVYQIPHDYWGQGTQVTVSS

SEQ ID NO: 39157 - protein, 116 aa, Artificial Sequence
  Chemically Synthesized
QVQLQESGGGLVQAGGSLRLSCAASGTISIDRYMGWYRQAPGKEREFVAAIAGGASTNYADSVKGRFTISRDNAKNTVYLQMNSLKPEDTAVYYCAALVNLTTFYWGQGTQVTVSS

SEQ ID NO: 39158 - protein, 126 aa, Artificial Sequence
  Chemically Synthesized
QVQLQESGGGLVQAGGSLRLSCAASGSISFDYYMGWYRQAPGKERELVAAISTGGITYYADSVKGRFTISRDNAKNTVYLQMNSLKPEDTAVYYCAAYGGYWSYWLHYPIISLRYWGQGTQVTVSS

SEQ ID NO: 39159 - protein, 112 aa, Artificial Sequence
  Chemically Synthesized
QVQLQESGGGLVQAGGSLRLSCAASGSIFASGQMGWYRQAPGKEREFVAGISYGGNTYYADSVKGRFTISRDNAKNTVYLQMNSLKPEDTAVYYCAARSYYWGQGTQVTVSS

SEQ ID NO: 39160 - protein, 118 aa, Artificial Sequence
  Chemically Synthesized
QVQLQESGGGLVQAGGSLRLSCAASGYISVTYSMGWYRQAPGKERELVASIAYGTNTNYADSVKGRFTISRDNAKNTVYLQMNSLKPEDTAVYYCAAGVPSNPNYLYWGQGTQVTVSS

SEQ ID NO: 39161 - protein, 118 aa, Artificial Sequence
  Chemically Synthesized
QVQLQESGGGLVQAGGSLRLSCAASGNIFYGYFMGWYRQAPGKEREFVAGIGYGSNTNYADSVKGRFTISRDNAKNTVYLQMNSLKPEDTAVYYCAARPYDTNGLAYWGQGTQVTVSS

SEQ ID NO: 39162 - protein, 118 aa, Artificial Sequence
  Chemically Synthesized
QVQLQESGGGLVQAGGSLRLSCAASGSISTNPYMGWYRQAPGKERELVASISYGSTTNYADSVKGRFTISRDNAKNTVYLQMNSLKPEDTAVYYCAAHDLSGNRHGYWGQGTQVTVSS

SEQ ID NO: 39163 - protein, 126 aa, Artificial Sequence
  Chemically Synthesized
QVQLQESGGGLVQAGGSLRLSCAASGTISTSYIMGWYRQAPGKERELVASIAHGTNTYYADSVKGRFTISRDNAKNTVYLQMNSLKPEDTAVYYCAVPDPPGDGTSNSYEPYYPYWGQGTQVTVSS

SEQ ID NO: 39164 - protein, 118 aa, Artificial Sequence
  Chemically Synthesized
QVQLQESGGGLVQAGGSLRLSCAASGYIFYYVLMGWYRQAPGKERELVASITAGTITYYADSVKGRFTISRDNAKNTVYLQMNSLKPEDTAVYYCAVRIPYATYHDYWGQGTQVTVSS

SEQ ID NO: 39165 - protein, 118 aa, Artificial Sequence
  Chemically Synthesized
QVQLQESGGGLVQAGGSLRLSCAASGTISRQHAMGWYRQAPGKEREFVAAIGTGGSTNYADSVKGRFTISRDNAKNTVYLQMNSLKPEDTAVYYCAVPDPLSYAYRYWGQGTQVTVSS

SEQ ID NO: 39166 - protein, 126 aa, Artificial Sequence
  Chemically Synthesized
QVQLQESGGGLVQAGGSLRLSCAASGSIFVAAYMGWYRQAPGKEREFVAGITRGSNTYYADSVKGRFTISRDNAKNTVYLQMNSLKPEDTAVYYCAVTRRNGSGYWRGRDWVLQYWGQGTQVTVSS

SEQ ID NO: 39167 - protein, 126 aa, Artificial Sequence
  Chemically Synthesized
QVQLQESGGGLVQAGGSLRLSCAASGYISKRAGMGWYRQAPGKEREFVAGISYGSNTYYADSVKGRFTISRDNAKNTVYLQMNSLKPEDTAVYYCAADGTDYQQSYGWRKRKHHYWGQGTQVTVSS

SEQ ID NO: 39168 - protein, 118 aa, Artificial Sequence
  Chemically Synthesized
QVQLQESGGGLVQAGGSLRLSCAASGYISNSWYMGWYRQAPGKERELVATISWGGTTNYADSVKGRFTISRDNAKNTVYLQMNSLKPEDTAVYYCAAFADDGADFPYWGQGTQVTVSS

SEQ ID NO: 39169 - protein, 126 aa, Artificial Sequence
  Chemically Synthesized
QVQLQESGGGLVQAGGSLRLSCAASGTIFPGRDMGWYRQAPGKEREFVAAISRGGITYYADSVKGRFTISRDNAKNTVYLQMNSLKPEDTAVYYCAAEQYYVYDYSDNPYSAHSYWGQGTQVTVSS

SEQ ID NO: 39170 - protein, 118 aa, Artificial Sequence
  Chemically Synthesized
QVQLQESGGGLVQAGGSLRLSCAASGNIFPWEYMGWYRQAPGKERELVASIATGSSTNYADSVKGRFTISRDNAKNTVYLQMNSLKPEDTAVYYCAALTYPTYIHGYWGQGTQVTVSS

SEQ ID NO: 39171 - protein, 118 aa, Artificial Sequence
  Chemically Synthesized
QVQLQESGGGLVQAGGSLRLSCAASGYISDVYPMGWYRQAPGKERELVATINRGANTNYADSVKGRFTISRDNAKNTVYLQMNSLKPEDTAVYYCAANYGSYIWYGYWGQGTQVTVSS

SEQ ID NO: 39172 - protein, 126 aa, Artificial Sequence
  Chemically Synthesized
QVQLQESGGGLVQAGGSLRLSCAASGNIFVIRYMGWYRQAPGKEREFVAGISLGATTYYADSVKGRFTISRDNAKNTVYLQMNSLKPEDTAVYYCAAAVYLSNVGQGDGYTDLDYWGQGTQVTVSS

SEQ ID NO: 39173 - protein, 126 aa, Artificial Sequence
  Chemically Synthesized
QVQLQESGGGLVQAGGSLRLSCAASGNISPGDYMGWYRQAPGKERELVAGINHGSTTNYADSVKGRFTISRDNAKNTVYLQMNSLKPEDTAVYYCAVDSADGFDRTISQDAIHFYWGQGTQVTVSS

SEQ ID NO: 39174 - protein, 118 aa, Artificial Sequence
  Chemically Synthesized
QVQLQESGGGLVQAGGSLRLSCAASGSIFNRLFMGWYRQAPGKEREFVAGIGNGGNTYYADSVKGRFTISRDNAKNTVYLQMNSLKPEDTAVYYCAVYPWWYRDFAYWGQGTQVTVSS

SEQ ID NO: 39175 - protein, 118 aa, Artificial Sequence
  Chemically Synthesized
QVQLQESGGGLVQAGGSLRLSCAASGSIFIGASMGWYRQAPGKEREFVASISRGGTTNYADSVKGRFTISRDNAKNTVYLQMNSLKPEDTAVYYCAVGWYGLWYHGYWGQGTQVTVSS

SEQ ID NO: 39176 - protein, 120 aa, Artificial Sequence
  Chemically Synthesized
QVQLQESGGGLVQAGGSLRLSCAASGYISDRSDMGWYRQAPGKEREFVASIDLGTITNYADSVKGRFTISRDNAKNTVYLQMNSLKPEDTAVYYCAVGTYSLTTLVTMYWGQGTQVTVSS

SEQ ID NO: 39177 - protein, 121 aa, Artificial Sequence
  Chemically Synthesized
QVQLQESGGGLVQAGGSLRLSCAASGTISGSHYMGWYRQAPGKERELVAGIGWGANTNYADSVKGRFTISRDNAKNTVYLQMNSLKPEDTAVYYCAVPYYSSFCSTSTLYWGQGTQVTVSS

SEQ ID NO: 39178 - protein, 122 aa, Artificial Sequence
  Chemically Synthesized
QVQLQESGGGLVQAGGSLRLSCAASGTIFQWNTMGWYRQAPGKERELVATITRGASTNYADSVKGRFTISRDNAKNTVYLQMNSLKPEDTAVYYCAARLYHPYWNIWSYDYWGQGTQVTVSS

SEQ ID NO: 39179 - protein, 118 aa, Artificial Sequence
  Chemically Synthesized
QVQLQESGGGLVQAGGSLRLSCAASGYIFGWEQMGWYRQAPGKERELVASIGWGGITNYADSVKGRFTISRDNAKNTVYLQMNSLKPEDTAVYYCAVFRGDYDILYYWGQGTQVTVSS

SEQ ID NO: 39180 - protein, 111 aa, Artificial Sequence
  Chemically Synthesized
QVQLQESGGGLVQAGGSLRLSCAASGTISWVDDMGWYRQAPGKERELVAAINQGGSTNYADSVKGRFTISRDNAKNTVYLQMNSLKPEDTAVYYCAVYIYWGQGTQVTVSS

SEQ ID NO: 39181 - protein, 126 aa, Artificial Sequence
  Chemically Synthesized
QVQLQESGGGLVQAGGSLRLSCAASGNISGDNAMGWYRQAPGKERELVATISYGGNTNYADSVKGRFTISRDNAKNTVYLQMNSLKPEDTAVYYCAARRVLDWYQHAVRQDDHAYWGQGTQVTVSS

SEQ ID NO: 39182 - protein, 117 aa, Artificial Sequence
  Chemically Synthesized
QVQLQESGGGLVQAGGSLRLSCAASGNIFTRPYMGWYRQAPGKERELVATIGVGGSTYYADSVKGRFTISRDNAKNTVYLQMNSLKPEDTAVYYCAAYVAGSVTLYWGQGTQVTVSS

SEQ ID NO: 39183 - protein, 122 aa, Artificial Sequence
  Chemically Synthesized
QVQLQESGGGLVQAGGSLRLSCAASGTIFGDFSMGWYRQAPGKERELVAGIGVGTNTYYADSVKGRFTISRDNAKNTVYLQMNSLKPEDTAVYYCAVGDVRDRYVGVSFRYWGQGTQVTVSS

SEQ ID NO: 39184 - protein, 118 aa, Artificial Sequence
  Chemically Synthesized
QVQLQESGGGLVQAGGSLRLSCAASGYISVDPRMGWYRQAPGKEREFVAGIDYGSITYYADSVKGRFTISRDNAKNTVYLQMNSLKPEDTAVYYCAAYYGSNDLHDYWGQGTQVTVSS

SEQ ID NO: 39185 - protein, 122 aa, Artificial Sequence
  Chemically Synthesized
QVQLQESGGGLVQAGGSLRLSCAASGTISYRWDMGWYRQAPGKERELVAAIDPGGNTNYADSVKGRFTISRDNAKNTVYLQMNSLKPEDTAVYYCAAPADGEVYSDDGFQYWGQGTQVTVSS

SEQ ID NO: 39186 - protein, 118 aa, Artificial Sequence
  Chemically Synthesized
QVQLQESGGGLVQAGGSLRLSCAASGYIFSTWWMGWYRQAPGKEREFVAGIAYGGNTNYADSVKGRFTISRDNAKNTVYLQMNSLKPEDTAVYYCAATVLDYIYLIYWGQGTQVTVSS

SEQ ID NO: 39187 - protein, 117 aa, Artificial Sequence
  Chemically Synthesized
QVQLQESGGGLVQAGGSLRLSCAASGTIFLPYMGWYRQAPGKERELVAGISYGGTTYYADSVKGRFTISRDNAKNTVYLQMNSLKPEDTAVYYCAGQAYPTQDHTYWGQGTQVTVSS

SEQ ID NO: 39188 - protein, 126 aa, Artificial Sequence
  Chemically Synthesized
QVQLQESGGGLVQAGGSLRLSCAASGSISDSRVMGWYRQAPGKERELVASISYGAITNYADSVKGRFTISRDNAKNTVYLQMNSLKPEDTAVYYCAVWDYGDDWDAAVYSSYYYYWGQGTQVTVSS

SEQ ID NO: 39189 - protein, 126 aa, Artificial Sequence
  Chemically Synthesized
QVQLQESGGGLVQAGGSLRLSCAASGSISPAGQMGWYRQAPGKERELVASISYGANTNYADSVKGRFTISRDNAKNTVYLQMNSLKPEDTAVYYCAAWDANDQAGIRRGAIDFPYWGQGTQVTVSS

SEQ ID NO: 39190 - protein, 122 aa, Artificial Sequence
  Chemically Synthesized
QVQLQESGGGLVQAGGSLRLSCAASGNISYDDYMGWYRQAPGKEREFVASISYGTITNYADSVKGRFTISRDNAKNTVYLQMNSLKPEDTAVYYCAAISQSRQRDQTTYDYWGQGTQVTVSS

SEQ ID NO: 39191 - protein, 118 aa, Artificial Sequence
  Chemically Synthesized
QVQLQESGGGLVQAGGSLRLSCAASGSIFNVGTMGWYRQAPGKERELVATITYGGTTYYADSVKGRFTISRDNAKNTVYLQMNSLKPEDTAVYYCAVTVTDGAYHYYWGQGTQVTVSS

SEQ ID NO: 39192 - protein, 119 aa, Artificial Sequence
  Chemically Synthesized
QVQLQESGGGLVQAGGSLRLSCAASGNISADIVMGWYRQAPGKEREFVAYQYADSVKGRFTISRDNAKNTVYLQMNSLKPEDTAVYYCAALWNGLDATYSLSIWRYRYWGQGTQVTVSS

SEQ ID NO: 39193 - protein, 118 aa, Artificial Sequence
  Chemically Synthesized
QVQLQESGGGLVQAGGSLRLSCAASGTISRYYVMGWYRQAPGKEREFVATITPGTSTNYADSVKGRFTISRDNAKNTVYLQMNSLKPEDTAVYYCAVHYIATQFHWYWGQGTQVTVSS

SEQ ID NO: 39194 - protein, 126 aa, Artificial Sequence
  Chemically Synthesized
QVQLQESGGGLVQAGGSLRLSCAASGNISARDNMGWYRQAPGKEREFVATITDGSSTYYADSVKGRFTISRDNAKNTVYLQMNSLKPEDTAVYYCAVEYTGAVLRYSWGNYFFPYWGQGTQVTVSS

SEQ ID NO: 39195 - protein, 122 aa, Artificial Sequence
  Chemically Synthesized
QVQLQESGGGLVQAGGSLRLSCAASGNISNSVDMGWYRQAPGKERELVAAITSGSITYYADSVKGRFTISRDNAKNTVYLQMNSLKPEDTAVYYCAVPYQEGTTGNPSLRYWGQGTQVTVSS

SEQ ID NO: 39196 - protein, 126 aa, Artificial Sequence
  Chemically Synthesized
QVQLQESGGGLVQAGGSLRLSCAASGTISDYFSMGWYRQAPGKERELVASIGHDGGTTYYADSVKGRFTISRDNAKNTVYLQMNSLKPEDTAVYYCAVHYYYSVIAVPYYRNHYYWGQGTQVTVSS

SEQ ID NO: 39197 - protein, 118 aa, Artificial Sequence
  Chemically Synthesized
QVQLQESGGGLVQAGGSLRLSCAASGTISDRLDMGWYRQAPGKEREFVAGIDYGATTYYADSVKGRFTISRDNAKNTVYLQMNSLKPEDTAVYYCAAGEIEFDYFRYWGQGTQVTVSS

SEQ ID NO: 39198 - protein, 120 aa, Artificial Sequence
  Chemically Synthesized
QVQLQESGGGLVQAGGSLRLSCAASGTISPYSYMGWYRQAPGKEREFVVVLPYADSVKGRFTISRDNAKNTVYLQMNSLKPEDTAVYYCAVSYYHGRSDYRDDGYGFDYWGQGTQVTVSS

SEQ ID NO: 39199 - protein, 121 aa, Artificial Sequence
  Chemically Synthesized
QVQLQESGGGLVQAGGSLRLSCAASGYISSLGDMGWYRQAPGKEREFVAALMVVVVPYADSVKGRFTISRDNAKNTVYLQMNSLKPEDTAVYYCAVRSFASSYQIPAFSYWGQGTQVTVSS

SEQ ID NO: 39200 - protein, 118 aa, Artificial Sequence
  Chemically Synthesized
QVQLQESGGGLVQAGGSLRLSCAASGSIFNYRFMGWYRQAPGKERELVASIAGGAITNYADSVKGRFTISRDNAKNTVYLQMNSLKPEDTAVYYCAAVRYYTYRLVYWGQGTQVTVSS

SEQ ID NO: 39201 - protein, 118 aa, Artificial Sequence
  Chemically Synthesized
QVQLQESGGGLVQAGGSLRLSCAASGSISARGVMGWYRQAPGKEREFVASINGGASTYYADSVKGRFTISRDNAKNTVYLQMNSLKPEDTAVYYCAAWAWRVDRHYYWGQGTQVTVSS

SEQ ID NO: 39202 - protein, 110 aa, Artificial Sequence
  Chemically Synthesized
QVQLQESGGGLVQAGGSLRLSCAASGYISDPFPMGWYRQAPGKEREFVAVLVTVVVPYADSVKGRFTISRDNAKNTVYLQMNSLKPEDTAVYYCASFAYWGQGTQVTVSS

SEQ ID NO: 39203 - protein, 122 aa, Artificial Sequence
  Chemically Synthesized
QVQLQESGGGLVQAGGSLRLSCAASGTISVDVDMGWYRQAPGKEREFVASINLGTITYYADSVKGRFTISRDNAKNTVYLQMNSLKPEDTAVYYCAVHFDNQNGVLIGLGYWGQGTQVTVSS

SEQ ID NO: 39204 - protein, 121 aa, Artificial Sequence
  Chemically Synthesized
QVQLQESGGGLVQAGGSLRLSCAASGSISSRDTMGWYRQAPGKERELVATITSVLVPYADSVKGRFTISRDNAKNTVYLQMNSLKPEDTAVYYCAVGVAYNSFYLDIYTYWGQGTQVTVSS

SEQ ID NO: 39205 - protein, 117 aa, Artificial Sequence
  Chemically Synthesized
QVQLQESGGGLVQAGGSLRLSCAASGTIFYINMGWYRQAPGKEREFVATISDGTTTYYADSVKGRFTISRDNAKNTVYLQMNSLKPEDTAVYYCAVPGHPQPGHRYWGQGTQVTVSS

SEQ ID NO: 39206 - protein, 122 aa, Artificial Sequence
  Chemically Synthesized
QVQLQESGGGLVQAGGSLRLSCAASGYISGYFGMGWYRQAPGKERELVAAIALGTSTYYADSVKGRFTISRDNAKNTVYLQMNSLKPEDTAVYYCAVYWRRRTNQRVGHAYWGQGTQVTVSS

SEQ ID NO: 39207 - protein, 117 aa, Artificial Sequence
  Chemically Synthesized
QVQLQESGGGLVQAGGSLRLSCAASGSISPGKVMGWYRQAPGKEREFVATIDYGTNTNYADSVKGRFTISRDNAKNTVYLQMNSLKPEDTAVYYCAVGDRTSLVMYWGQGTQVTVSS

SEQ ID NO: 39208 - protein, 117 aa, Artificial Sequence
  Chemically Synthesized
QVQLQESGGGLVQAGGSLRLSCAASGTISLLSMGWYRQAPGKERELVASITKGSSTNYADSVKGRFTISRDNAKNTVYLQMNSLKPEDTAVYYCAVFCRYADYHSYWGQGTQVTVSS

SEQ ID NO: 39209 - protein, 117 aa, Artificial Sequence
  Chemically Synthesized
QVQLQESGGGLVQAGGSLRLSCAASGSISDVYTMGWYRQAPGKERELVASIAGGTITYYADSVKGRFTISRDNAKNTVYLQMNSLKPEDTAVYYCAVYYDRDIYPYWGQGTQVTVSS

SEQ ID NO: 39210 - protein, 118 aa, Artificial Sequence
  Chemically Synthesized
QVQLQESGGGLVQAGGSLRLSCAASGYISVAGVMGWYRQAPGKEREFVAGITAGTSTYYADSVKGRFTISRDNAKNTVYLQMNSLKPEDTAVYYCAAAVEYADELTYWGQGTQVTVSS

SEQ ID NO: 39211 - protein, 122 aa, Artificial Sequence
  Chemically Synthesized
QVQLQESGGGLVQAGGSLRLSCAASGYIFNAVRMGWYRQAPGKERELVATIGNGANTYYADSVKGRFTISRDNAKNTVYLQMNSLKPEDTAVYYCAATYPGRAGYVWWYDYWGQGTQVTVSS

SEQ ID NO: 39212 - protein, 117 aa, Artificial Sequence
  Chemically Synthesized
QVQLQESGGGLVQAGGSLRLSCAASGYFSVLLMGWYRQAPGKERELVATINFGANTYYADSVKGRFTISRDNAKNTVYLQMNSLKPEDTAVYYCAVAGGNASIHGYWGQGTQVTVSS

SEQ ID NO: 39213 - protein, 111 aa, Artificial Sequence
  Chemically Synthesized
QVQLQESGGGLVQAGGSLRLSCAASGSIFHYTSMGWYRQAPGKERESYADSVKGRFTISRDNAKNTVYLQMNSLKPEDTAVYYCAVLYGDRGDDYHRLGYWGQGTQVTVSS

SEQ ID NO: 39214 - protein, 118 aa, Artificial Sequence
  Chemically Synthesized
QVQLQESGGGLVQAGGSLRLSCAASGSISIDKVMGWYRQAPGKERELVAAINQGATTYYADSVKGRFTISRDNAKNTVYLQMNSLKPEDTAVYYCAAGRTDTDVLPYWGQGTQVTVSS

SEQ ID NO: 39215 - protein, 117 aa, Artificial Sequence
  Chemically Synthesized
QVQLQESGGGLVQAGGSLRLSCAASGSIFRGIQMGWYRQAPGKEREFVAAIDRGSNTNYADSVKGRFTISRDNAKNTVYLQMNSLKPEDTAVYYCAAYITSVLTFYWGQGTQVTVSS

SEQ ID NO: 39216 - protein, 110 aa, Artificial Sequence
  Chemically Synthesized
QVQLQESGGGLVQAGGSLRLSCAASGTISAGTFMGWYRQAPGKEREFVAGISAGANTYYADSVKGRFTISRDNAKNTVYLQMNSLKPEDTAVYYCAAMYWGQGTQVTVSS

SEQ ID NO: 39217 - protein, 117 aa, Artificial Sequence
  Chemically Synthesized
QVQLQESGGGLVQAGGSLRLSCAASGTISGLYLMGWYRQAPGKEREFVAGIDVGATTNYADSVKGRFTISRDNAKNTVYLQMNSLKPEDTAVYYCAADYSCVLLLYWGQGTQVTVSS

SEQ ID NO: 39218 - protein, 122 aa, Artificial Sequence
  Chemically Synthesized
QVQLQESGGGLVQAGGSLRLSCAASGTISVAYNMGWYRQAPGKEREFVASIGYGTNTNYADSVKGRFTISRDNAKNTVYLQMNSLKPEDTAVYYCAARYIQYFQDWPGHYYWGQGTQVTVSS

SEQ ID NO: 39219 - protein, 122 aa, Artificial Sequence
  Chemically Synthesized
QVQLQESGGGLVQAGGSLRLSCAASGSISDIRYMGWYRQAPGKEREFVASISPGATTYYADSVKGRFTISRDNAKNTVYLQMNSLKPEDTAVYYCAAVGYDYTASAPPYDYWGQGTQVTVSS

SEQ ID NO: 39220 - protein, 126 aa, Artificial Sequence
  Chemically Synthesized
QVQLQESGGGLVQAGGSLRLSCAASGTIFGYRLMGWYRQAPGKEREFVAGISQGTITYYADSVKGRFTISRDNAKNTVYLQMNSLKPEDTAVYYCAVNYDGDVVDTPTAPYGHAYWGQGTQVTVSS

SEQ ID NO: 39221 - protein, 122 aa, Artificial Sequence
  Chemically Synthesized
QVQLQESGGGLVQAGGSLRLSCAASGNISFTVGMGWYRQAPGKERELVATIGIGATTNYADSVKGRFTISRDNAKNTVYLQMNSLKPEDTAVYYCAVINSFATYETYSHDYWGQGTQVTVSS

SEQ ID NO: 39222 - protein, 118 aa, Artificial Sequence
  Chemically Synthesized
QVQLQESGGGLVQAGGSLRLSCAASGNIFYLTYMGWYRQAPGKERELVAAITRGGTTYYADSVKGRFTISRDNAKNTVYLQMNSLKPEDTAVYYCAVSAPYRWTYRYWGQGTQVTVSS

SEQ ID NO: 39223 - protein, 118 aa, Artificial Sequence
  Chemically Synthesized
QVQLQESGGGLVQAGGSLRLSCAASGYIFAAKFMGWYRQAPGKERELVAAIDGGATTYYADSVKGRFTISRDNAKNTVYLQMNSLKPEDTAVYYCAAGPPVAGQFEYWGQGTQVTVSS

SEQ ID NO: 39224 - protein, 116 aa, Artificial Sequence
  Chemically Synthesized
QVQLQESGGGLVQAGGSLRLSCAASGYISGDFGMGWYRQAPGKERELLPVLLTVLIPYADSVKGRFTISRDNAKNTVYLQMNSLKPEDTAVYYCAVKRDDLSTIYWGQGTQVTVSS

SEQ ID NO: 39225 - protein, 118 aa, Artificial Sequence
  Chemically Synthesized
QVQLQESGGGLVQAGGSLRLSCAASGNISSNYYMGWYRQAPGKERELVASIGYGGSTNYADSVKGRFTISRDNAKNTVYLQMNSLKPEDTAVYYCAVADEGPWGHYYWGQGTQVTVSS

SEQ ID NO: 39226 - protein, 121 aa, Artificial Sequence
  Chemically Synthesized
QVQLQESGGGLVQAGGSLRLSCAASGSIFAGYMGWYRQAPGKERELVASISYGGSTYYADSVKGRFTISRDNAKNTVYLQMNSLKPEDTAVYYCAAPLYVPDGSAHDLDYWGQGTQVTVSS

SEQ ID NO: 39227 - protein, 118 aa, Artificial Sequence
  Chemically Synthesized
QVQLQESGGGLVQAGGSLRLSCAASGTISWAYSMGWYRQAPGKEREFVAGISQGGNTNYADSVKGRFTISRDNAKNTVYLQMNSLKPEDTAVYYCAAVWDDESYLSYWGQGTQVTVSS

SEQ ID NO: 39228 - protein, 126 aa, Artificial Sequence
  Chemically Synthesized
QVQLQESGGGLVQAGGSLRLSCAASGTISPPTAMGWYRQAPGKEREFVASISNGGTTNYADSVKGRFTISRDNAKNTVYLQMNSLKPEDTAVYYCAVYTGLISYGYTATEYRFTYWGQGTQVTVSS

SEQ ID NO: 39229 - protein, 118 aa, Artificial Sequence
  Chemically Synthesized
QVQLQESGGGLVQAGGSLRLSCAASGSISDASSMGWYRQAPGKERELVAGITAGSSTNYADSVKGRFTISRDNAKNTVYLQMNSLKPEDTAVYYCAADYAFGHSLPYWGQGTQVTVSS

SEQ ID NO: 39230 - protein, 116 aa, Artificial Sequence
  Chemically Synthesized
QVQLQESGGGLVQAGGSLRLSCAASGNIFNSTMGWYRQAPGKERELVPLLITVVLPYADSVKGRFTISRDNAKNTVYLQMNSLKPEDTAVYYCAVGWTASDWLVYWGQGTQVTVSS

SEQ ID NO: 39231 - protein, 118 aa, Artificial Sequence
  Chemically Synthesized
QVQLQESGGGLVQAGGSLRLSCAASGSISRRPRMGWYRQAPGKERELVAGIAHGSSTYYADSVKGRFTISRDNAKNTVYLQMNSLKPEDTAVYYCAAGYGYVDIFRYWGQGTQVTVSS

SEQ ID NO: 39232 - protein, 122 aa, Artificial Sequence
  Chemically Synthesized
QVQLQESGGGLVQAGGSLRLSCAASGTIFDQPVMGWYRQAPGKEREFVATIGTGASTNYADSVKGRFTISRDNAKNTVYLQMNSLKPEDTAVYYCAVGTDITYFESDTHGYWGQGTQVTVSS

SEQ ID NO: 39233 - protein, 121 aa, Artificial Sequence
  Chemically Synthesized
QVQLQESGGGLVQAGGSLRLSCAASGNISSAADMGWYRQAPGKERELVATITYGTSTYYADSVKGRFTISRDNAKNTVYLQMNSLKPEDTAVYYCAAFTGLVYDDGPLAYWGQGTQVTVSS

SEQ ID NO: 39234 - protein, 122 aa, Artificial Sequence
  Chemically Synthesized
QVQLQESGGGLVQAGGSLRLSCAASGSISGYYDMGWYRQAPGKERELVAAIDAGATTNYADSVKGRFTISRDNAKNTVYLQMNSLKPEDTAVYYCAVDTARVYDATAYHWYWGQGTQVTVSS

SEQ ID NO: 39235 - protein, 118 aa, Artificial Sequence
  Chemically Synthesized
QVQLQESGGGLVQAGGSLRLSCAASGTISWPYWMGWYRQAPGKEREFVASITSGGITYYADSVKGRFTISRDNAKNTVYLQMNSLKPEDTAVYYCAVGYLSDVLHDYWGQGTQVTVSS

SEQ ID NO: 39236 - protein, 122 aa, Artificial Sequence
  Chemically Synthesized
QVQLQESGGGLVQAGGSLRLSCAASGTIFGPYQMGWYRQAPGKEREFVASIGPGGSTNYADSVKGRFTISRDNAKNTVYLQMNSLKPEDTAVYYCAVGETVATVVLSWYRYWGQGTQVTVSS

SEQ ID NO: 39237 - protein, 125 aa, Artificial Sequence
  Chemically Synthesized
QVQLQESGGGLVQAGGSLRLSCAASGNIFTKFIMGWYRQAPGKERELVAGIDVGASTNYADSVKGRFTISRDNAKNTVYLQMNSLKPEDTAVYYCAVSYLGIYEYSGPYETYHYWGQGTQVTVSS

SEQ ID NO: 39238 - protein, 126 aa, Artificial Sequence
  Chemically Synthesized
QVQLQESGGGLVQAGGSLRLSCAASGNISPDYDMGWYRQAPGKEREFVASIDIGSITYYADSVKGRFTISRDNAKNTVYLQMNSLKPEDTAVYYCAVGTARFGDDLEAYYFVFGYWGQGTQVTVSS

SEQ ID NO: 39239 - protein, 123 aa, Artificial Sequence
  Chemically Synthesized
QVQLQESGGGLVQAGGSLRLSCAASGYISDPYRLMGWYRQAPGKEREFVASISAGSNTNYADSVKGRFTISRDNAKNTVYLQMNSLKPEDTAVYYCAARYQLAGTYGYDLSYWGQGTQVTVSS

SEQ ID NO: 39240 - protein, 116 aa, Artificial Sequence
  Chemically Synthesized
QVQLQESGGGLVQAGGSLRLSCAASGTISTDILMGWYRQAPGKEREFVASITRGGSTYYADSVKGRFTISRDNAKNTVYLQMNSLKPEDTAVYYCAAGAGQYLYYWGQGTQVTVSS

SEQ ID NO: 39241 - protein, 118 aa, Artificial Sequence
  Chemically Synthesized
QVQLQESGGGLVQAGGSLRLSCAASGNISDSYYMGWYRQAPGKEREFVAGIAWGAITYYADSVKGRFTISRDNAKNTVYLQMNSLKPEDTAVYYCAVGYDYDPSFCYWGQGTQVTVSS

SEQ ID NO: 39242 - protein, 118 aa, Artificial Sequence
  Chemically Synthesized
QVQLQESGGGLVQAGGSLRLSCAASGTISSQFAMGWYRQAPGKERELVASISSGTTTNYADSVKGRFTISRDNAKNTVYLQMNSLKPEDTAVYYCAVDTNAEVVFGYWGQGTQVTVSS

SEQ ID NO: 39243 - protein, 122 aa, Artificial Sequence
  Chemically Synthesized
QVQLQESGGGLVQAGGSLRLSCAASGNIFQWRGMGWYRQAPGKEREFVAAITRGGTTYYADSVKGRFTISRDNAKNTVYLQMNSLKPEDTAVYYCAVFNAPYHWGSRRYRYWGQGTQVTVSS

SEQ ID NO: 39244 - protein, 126 aa, Artificial Sequence
  Chemically Synthesized
QVQLQESGGGLVQAGGSLRLSCAASGSISAAVDMGWYRQAPGKERELVASIGTGGNTNYADSVKGRFTISRDNAKNTVYLQMNSLKPEDTAVYYCAVVPGDWDGEYYDRVHAHYYWGQGTQVTVSS

SEQ ID NO: 39245 - protein, 125 aa, Artificial Sequence
  Chemically Synthesized
QVQLQESGGGLVQAGGSLRLSCAASGNIFGVLSMGWYRQAPGKEREFVAAISSVVVPYADSVKGRFTISRDNAKNTVYLQMNSLKPEDTAVYYCAAEIVAPNRLAYSDAPIFGYWGQGTQVTVSS

SEQ ID NO: 39246 - protein, 117 aa, Artificial Sequence
  Chemically Synthesized
QVQLQESGGGLVQAGGSLRLSCAASGNIFDPTMGWYRQAPGKERELVATITYGTITYYADSVKGRFTISRDNAKNTVYLQMNSLKPEDTAVYYCAAYAPDYPDHSYWGQGTQVTVSS

SEQ ID NO: 39247 - protein, 121 aa, Artificial Sequence
  Chemically Synthesized
QVQLQESGGGLVQAGGSLRLSCAASGTISDAGNMGWYRQAPGKEREFVAAIDTGLLPYADSVKGRFTISRDNAKNTVYLQMNSLKPEDTAVYYCAANQSFSRAEYSNLSYWGQGTQVTVSS

SEQ ID NO: 39248 - protein, 122 aa, Artificial Sequence
  Chemically Synthesized
QVQLQESGGGLVQAGGSLRLSCAASGSIFDKGDMGWYRQAPGKEREFVASIDYGTITYYADSVKGRFTISRDNAKNTVYLQMNSLKPEDTAVYYCAVQPYWLDDEYLWHDYWGQGTQVTVSS

SEQ ID NO: 39249 - protein, 113 aa, Artificial Sequence
  Chemically Synthesized
QVQLQESGGGLVQAGGSLRLSCAASGSISSRIDMGWYRQAPGKEREFVAAIAIGSNTYYADSVKGRFTISRDNAKNTVYLQMNSLKPEDTAVYYCAVYQLGYWGQGTQVTVSS

SEQ ID NO: 39250 - protein, 118 aa, Artificial Sequence
  Chemically Synthesized
QVQLQESGGGLVQAGGSLRLSCAASGSISVGTYMGWYRQAPGKERELVAGIDSGASTYYADSVKGRFTISRDNAKNTVYLQMNSLKPEDTAVYYCAALPSSNLTFIYWGQGTQVTVSS

SEQ ID NO: 39251 - protein, 118 aa, Artificial Sequence
  Chemically Synthesized
QVQLQESGGGLVQAGGSLRLSCAASGSISRGGTMGWYRQAPGKEREFVAAIDVGAITYYADSVKGRFTISRDNAKNTVYLQMNSLKPEDTAVYYCAAYDYYTADYPYWGQGTQVTVSS

SEQ ID NO: 39252 - protein, 118 aa, Artificial Sequence
  Chemically Synthesized
QVQLQESGGGLVQAGGSLRLSCAASGTISDGGFMGWYRQAPGKEREFVAAISAGSTTNYADSVKGRFTISRDNAKNTVYLQMNSLKPEDTAVYYCAAFRQAYTDHYYWGQGTQVTVSS

SEQ ID NO: 39253 - protein, 117 aa, Artificial Sequence
  Chemically Synthesized
QVQLQESGGGLVQAGGSLRLSCAASGSIFSYSIMGWYRQAPGKERELLPLLVSVLLPYADSVKGRFTISRDNAKNTVYLQMNSLKPEDTAVYYCAVPQSTRYVFDYWGQGTQVTVSS

SEQ ID NO: 39254 - protein, 118 aa, Artificial Sequence
  Chemically Synthesized
QVQLQESGGGLVQAGGSLRLSCAASGYISDSVDMGWYRQAPGKERELVAGIDYGTSTNYADSVKGRFTISRDNAKNTVYLQMNSLKPEDTAVYYCAANPVADRFYHYWGQGTQVTVSS

SEQ ID NO: 39255 - protein, 118 aa, Artificial Sequence
  Chemically Synthesized
QVQLQESGGGLVQAGGSLRLSCAASGSIFRPYNMGWYRQAPGKEREFVATIGNGTTTYYADSVKGRFTISRDNAKNTVYLQMNSLKPEDTAVYYCAVGWYGSYPHGYWGQGTQVTVSS

SEQ ID NO: 39256 - protein, 118 aa, Artificial Sequence
  Chemically Synthesized
QVQLQESGGGLVQAGGSLRLSCAASGTISYVTYMGWYRQAPGKERELVAAIGRGTNTYYADSVKGRFTISRDNAKNTVYLQMNSLKPEDTAVYYCAVSGRYARYLYYWGQGTQVTVSS

SEQ ID NO: 39257 - protein, 122 aa, Artificial Sequence
  Chemically Synthesized
QVQLQESGGGLVQAGGSLRLSCAASGNISTYEWMGWYRQAPGKEREFVATIAYGANTYYADSVKGRFTISRDNAKNTVYLQMNSLKPEDTAVYYCAVPYYAEDDTGLNLPYWGQGTQVTVSS

SEQ ID NO: 39258 - protein, 121 aa, Artificial Sequence
  Chemically Synthesized
QVQLQESGGGLVQAGGSLRLSCAASGTIFYFLAMGWYRQAPGKEREFVATIGYGSITNYADSVKGRFTISRDNAKNTVYLQMNSLKPEDTAVYYCAAGDRPWPSLTTTFYWGQGTQVTVSS

SEQ ID NO: 39259 - protein, 124 aa, Artificial Sequence
  Chemically Synthesized
QVQLQESGGGLVQAGGSLRLSCAASGNISGDRMGWYRQAPGKERELVAGITTGANTNYADSVKGRFTISRDNAKNTVYLQMNSLKPEDTAVYYCAVNYGNYKPYASVGTRTMYWGQGTQVTVSS

SEQ ID NO: 39260 - protein, 122 aa, Artificial Sequence
  Chemically Synthesized
QVQLQESGGGLVQAGGSLRLSCAASGSIFYGDGMGWYRQAPGKEREFVAGIDYGTNTNYADSVKGRFTISRDNAKNTVYLQMNSLKPEDTAVYYCAADPYLGDWLVSPYDYWGQGTQVTVSS

SEQ ID NO: 39261 - protein, 122 aa, Artificial Sequence
  Chemically Synthesized
QVQLQESGGGLVQAGGSLRLSCAASGTIFRDEFMGWYRQAPGKERELVASIGDGGSTNYADSVKGRFTISRDNAKNTVYLQMNSLKPEDTAVYYCAVDGDYVAIDAYTYGYWGQGTQVTVSS

SEQ ID NO: 39262 - protein, 118 aa, Artificial Sequence
  Chemically Synthesized
QVQLQESGGGLVQAGGSLRLSCAASGTIFDTPFMGWYRQAPGKERELVAGITYGSITNYADSVKGRFTISRDNAKNTVYLQMNSLKPEDTAVYYCAANRRGDLSYGYWGQGTQVTVSS

SEQ ID NO: 39263 - protein, 125 aa, Artificial Sequence
  Chemically Synthesized
QVQLQESGGGLVQAGGSLRLSCAASGSISYAFVMGWYRQAPGKEREFVAGINFGTITYYADSVKGRFTISRDNAKNTVYLQMNSLKPEDTAVYYCAVYVYEYYARQGAYYYHTYWGQGTQVTVSS

SEQ ID NO: 39264 - protein, 122 aa, Artificial Sequence
  Chemically Synthesized
QVQLQESGGGLVQAGGSLRLSCAASGYIFFGVTMGWYRQAPGKEREFVASIAYGASTYYADSVKGRFTISRDNAKNTVYLQMNSLKPEDTAVYYCAAGVRYDFQGQGTYPYWGQGTQVTVSS

SEQ ID NO: 39265 - protein, 122 aa, Artificial Sequence
  Chemically Synthesized
QVQLQESGGGLVQAGGSLRLSCAASGYIFFADTMGWYRQAPGKERELVAGISSGAITNYADSVKGRFTISRDNAKNTVYLQMNSLKPEDTAVYYCAVGPSDTYYYDYNYLYWGQGTQVTVSS

SEQ ID NO: 39266 - protein, 122 aa, Artificial Sequence
  Chemically Synthesized
QVQLQESGGGLVQAGGSLRLSCAASGYISAVRGMGWYRQAPGKERELVAAINQGGSTYYADSVKGRFTISRDNAKNTVYLQMNSLKPEDTAVYYCAARYRRVYYAKLPYYYWGQGTQVTVSS

SEQ ID NO: 39267 - protein, 118 aa, Artificial Sequence
  Chemically Synthesized
QVQLQESGGGLVQAGGSLRLSCAASGNISDWPLMGWYRQAPGKEREFVAAISTGTITNYADSVKGRFTISRDNAKNTVYLQMNSLKPEDTAVYYCAVNALAGRYHLYWGQGTQVTVSS

SEQ ID NO: 39268 - protein, 122 aa, Artificial Sequence
  Chemically Synthesized
QVQLQESGGGLVQAGGSLRLSCAASGSISYLYMGWYRQAPGKEREFVATIGVGTSTYYADSVKGRFTISRDNAKNTVYLQMNSLKPEDTAVYYCAADYDQDRSIASLFHDYWGQGTQVTVSS

SEQ ID NO: 39269 - protein, 126 aa, Artificial Sequence
  Chemically Synthesized
QVQLQESGGGLVQAGGSLRLSCAASGYISYAWFMGWYRQAPGKERELVASIGPGSSTYYADSVKGRFTISRDNAKNTVYLQMNSLKPEDTAVYYCAAKWTSRAEGYYWDVARHAYWGQGTQVTVSS

SEQ ID NO: 39270 - protein, 126 aa, Artificial Sequence
  Chemically Synthesized
QVQLQESGGGLVQAGGSLRLSCAASGNISKFRYMGWYRQAPGKEREFVAGIGYGATTYYADSVKGRFTISRDNAKNTVYLQMNSLKPEDTAVYYCAVAYGRGRGPWKTSQHAHPYWGQGTQVTVSS

SEQ ID NO: 39271 - protein, 118 aa, Artificial Sequence
  Chemically Synthesized
QVQLQESGGGLVQAGGSLRLSCAASGYIFTSGYMGWYRQAPGKERELVASISFGSITNYADSVKGRFTISRDNAKNTVYLQMNSLKPEDTAVYYCAARKRQILAYKYWGQGTQVTVSS

SEQ ID NO: 39272 - protein, 117 aa, Artificial Sequence
  Chemically Synthesized
QVQLQESGGGLVQAGGSLRLSCAASGSIFQLTPMGWYRQAPGKERELVAAIGTGATTYYADSVKGRFTISRDNAKNTVYLQMNSLKPEDTAVYYCAAHSYTLNHRYWGQGTQVTVSS

SEQ ID NO: 39273 - protein, 126 aa, Artificial Sequence
  Chemically Synthesized
QVQLQESGGGLVQAGGSLRLSCAASGYIFRFLHMGWYRQAPGKEREFVASITPGTTTNYADSVKGRFTISRDNAKNTVYLQMNSLKPEDTAVYYCAVRYRDGQSFPYYRLYPFYYWGQGTQVTVSS

SEQ ID NO: 39274 - protein, 118 aa, Artificial Sequence
  Chemically Synthesized
QVQLQESGGGLVQAGGSLRLSCAASGNIFPAWQMGWYRQAPGKEREFVAAIGYGGTTYYADSVKGRFTISRDNAKNTVYLQMNSLKPEDTAVYYCAAISTLHLELRYWGQGTQVTVSS

SEQ ID NO: 39275 - protein, 111 aa, Artificial Sequence
  Chemically Synthesized
QVQLQESGGGLVQAGGSLRLSCAASGYISDDFGMGWYRQAPGKERELVATIDHGANTYYADSVKGRFTISRDNAKNTVYLQMNSLKPEDTAVYYCAGLYYWGQGTQVTVSS

SEQ ID NO: 39276 - protein, 118 aa, Artificial Sequence
  Chemically Synthesized
QVQLQESGGGLVQAGGSLRLSCAASGSISAYYSMGWYRQAPGKERELVATIALGATTYYADSVKGRFTISRDNAKNTVYLQMNSLKPEDTAVYYCAVTNRDDKPFDYWGQGTQVTVSS

SEQ ID NO: 39277 - protein, 119 aa, Artificial Sequence
  Chemically Synthesized
QVQLQESGGGLVQAGGSLRLSCAASGSIFPPGDMGWYRQAPGKERELVATNYADSVKGRFTISRDNAKNTVYLQMNSLKPEDTAVYYCAVQNYADAPAYRNSSPYLYYWGQGTQVTVSS

SEQ ID NO: 39278 - protein, 118 aa, Artificial Sequence
  Chemically Synthesized
QVQLQESGGGLVQAGGSLRLSCAASGYISYDDAMGWYRQAPGKEREFVASIGYGTSTNYADSVKGRFTISRDNAKNTVYLQMNSLKPEDTAVYYCAAYYPEDTLHQYWGQGTQVTVSS

SEQ ID NO: 39279 - protein, 118 aa, Artificial Sequence
  Chemically Synthesized
QVQLQESGGGLVQAGGSLRLSCAASGYIFVTYVMGWYRQAPGKERELVATISVGAITYYADSVKGRFTISRDNAKNTVYLQMNSLKPEDTAVYYCAVRASEVNVHFYWGQGTQVTVSS

SEQ ID NO: 39280 - protein, 126 aa, Artificial Sequence
  Chemically Synthesized
QVQLQESGGGLVQAGGSLRLSCAASGYISWYYYMGWYRQAPGKERELVATIASGASTYYADSVKGRFTISRDNAKNTVYLQMNSLKPEDTAVYYCAAPEWEGIAYAYQQRGFLAYWGQGTQVTVSS

SEQ ID NO: 39281 - protein, 118 aa, Artificial Sequence
  Chemically Synthesized
QVQLQESGGGLVQAGGSLRLSCAASGSIFPQEPMGWYRQAPGKEREFVASINTGSNTYYADSVKGRFTISRDNAKNTVYLQMNSLKPEDTAVYYCAVGTGYYNYYYYWGQGTQVTVSS

SEQ ID NO: 39282 - protein, 118 aa, Artificial Sequence
  Chemically Synthesized
QVQLQESGGGLVQAGGSLRLSCAASGNIFSYRYMGWYRQAPGKEREFVAAITYGGSTNYADSVKGRFTISRDNAKNTVYLQMNSLKPEDTAVYYCAAYSDTQGDHYYWGQGTQVTVSS

SEQ ID NO: 39283 - protein, 125 aa, Artificial Sequence
  Chemically Synthesized
QVQLQESGGGLVQAGGSLRLSCAASGTISGTAAMGWYRQAPGKERELVAGIAVGSTNYADSVKGRFTISRDNAKNTVYLQMNSLKPEDTAVYYCAAGKGLYYVANRGVQPYHGYWGQGTQVTVSS

SEQ ID NO: 39284 - protein, 116 aa, Artificial Sequence
  Chemically Synthesized
QVQLQESGGGLVQAGGSLRLSCAASGSISSYAYMGWYRQAPGKEREFVASIDRGGSTNYADSVKGRFTISRDNAKNTVYLQMNSLKPEDTAVYYCAVGGLLGYPYWGQGTQVTVSS

SEQ ID NO: 39285 - protein, 126 aa, Artificial Sequence
  Chemically Synthesized
QVQLQESGGGLVQAGGSLRLSCAASGSISQAGNMGWYRQAPGKERELVAAITYGSSTYYADSVKGRFTISRDNAKNTVYLQMNSLKPEDTAVYYCAVGDAIYYTGGDGEDDEYDYWGQGTQVTVSS

SEQ ID NO: 39286 - protein, 118 aa, Artificial Sequence
  Chemically Synthesized
QVQLQESGGGLVQAGGSLRLSCAASGYISYLYYMGWYRQAPGKEREFVAAIGLGGITYYADSVKGRFTISRDNAKNTVYLQMNSLKPEDTAVYYCAALYQGAADHGYWGQGTQVTVSS

SEQ ID NO: 39287 - protein, 126 aa, Artificial Sequence
  Chemically Synthesized
QVQLQESGGGLVQAGGSLRLSCAASGNIFYGEDMGWYRQAPGKERELVASIGDGTITNYADSVKGRFTISRDNAKNTVYLQMNSLKPEDTAVYYCAVPDNLGIYYRYYSGGAHDYWGQGTQVTVSS

SEQ ID NO: 39288 - protein, 122 aa, Artificial Sequence
  Chemically Synthesized
QVQLQESGGGLVQAGGSLRLSCAASGNIFAIRYMGWYRQAPGKEREFVATIDPGGSTYYADSVKGRFTISRDNAKNTVYLQMNSLKPEDTAVYYCAVAYRVSQYYPTTHYYWGQGTQVTVSS

SEQ ID NO: 39289 - protein, 122 aa, Artificial Sequence
  Chemically Synthesized
QVQLQESGGGLVQAGGSLRLSCAASGSIFHEHVMGWYRQAPGKEREFVAGIAPGGTTYYADSVKGRFTISRDNAKNTVYLQMNSLKPEDTAVYYCAVGGYYYIYNLTDHLYWGQGTQVTVSS

SEQ ID NO: 39290 - protein, 118 aa, Artificial Sequence
  Chemically Synthesized
QVQLQESGGGLVQAGGSLRLSCAASGYISVHYYMGWYRQAPGKERELVAAIGRGTNTYYADSVKGRFTISRDNAKNTVYLQMNSLKPEDTAVYYCAVDDVDVGYFDYWGQGTQVTVSS

SEQ ID NO: 39291 - protein, 117 aa, Artificial Sequence
  Chemically Synthesized
QVQLQESGGGLVQAGGSLRLSCAASGSIFYIFTMGWYRQAPGKEREFVASITAGGSTNYADSVKGRFTISRDNAKNTVYLQMNSLKPEDTAVYYCAAYSWVAGPFYWGQGTQVTVSS

SEQ ID NO: 39292 - protein, 117 aa, Artificial Sequence
  Chemically Synthesized
QVQLQESGGGLVQAGGSLRLSCAASGNIFVVQTMGWYRQAPGKERELVAAIASGASTNYADSVKGRFTISRDNAKNTVYLQMNSLKPEDTAVYYCAAVSPSTTVIYWGQGTQVTVSS

SEQ ID NO: 39293 - protein, 118 aa, Artificial Sequence
  Chemically Synthesized
QVQLQESGGGLVQAGGSLRLSCAASGSIFWGYIMGWYRQAPGKEREFGQGTSTYYADSVKGRFTISRDNAKNTVYLQMNSLKPEDTAVYYCAVGYYADGGSVYRHYYWGQGTQVTVSS

SEQ ID NO: 39294 - protein, 126 aa, Artificial Sequence
  Chemically Synthesized
QVQLQESGGGLVQAGGSLRLSCAASGSISDWVYMGWYRQAPGKEREFVAAISDGANTYYADSVKGRFTISRDNAKNTVYLQMNSLKPEDTAVYYCAATYPDDYRLWYWLYDQLAYWGQGTQVTVSS

SEQ ID NO: 39295 - protein, 116 aa, Artificial Sequence
  Chemically Synthesized
QVQLQESGGGLVQAGGSLRLSCAASGSIFTLTMGWYRQAPGKERELVASIGRGATTNYADSVKGRFTISRDNAKNTVYLQMNSLKPEDTAVYYCAVSLTSSSTFYWGQGTQVTVSS

SEQ ID NO: 39296 - protein, 124 aa, Artificial Sequence
  Chemically Synthesized
QVQLQESGGGLVQAGGSLRLSCAASGSISGYPRMGWYRQAPGKERELVATITSGGTTNYADSVKGRFTISRDNAKNTVYLQMNSLKPEDTAVYYCAVRGYYLAGRRHPYYYPYWGQGTQVTVSS

SEQ ID NO: 39297 - protein, 118 aa, Artificial Sequence
  Chemically Synthesized
QVQLQESGGGLVQAGGSLRLSCAASGNIFAGRQMGWYRQAPGKERELVATIGRGANTYYADSVKGRFTISRDNAKNTVYLQMNSLKPEDTAVYYCAVPNWLPVVHNYWGQGTQVTVSS

SEQ ID NO: 39298 - protein, 118 aa, Artificial Sequence
  Chemically Synthesized
QVQLQESGGGLVQAGGSLRLSCAASGTISVSSYMGWYRQAPGKEREFVASIDSGGITNYADSVKGRFTISRDNAKNTVYLQMNSLKPEDTAVYYCAVWLYSRRYFAYWGQGTQVTVSS

SEQ ID NO: 39299 - protein, 118 aa, Artificial Sequence
  Chemically Synthesized
QVQLQESGGGLVQAGGSLRLSCAASGTISRYVRMGWYRQAPGKERELVAGIDLGTITNYADSVKGRFTISRDNAKNTVYLQMNSLKPEDTAVYYCAVWYRLYGVFLYWGQGTQVTVSS

SEQ ID NO: 39300 - protein, 118 aa, Artificial Sequence
  Chemically Synthesized
QVQLQESGGGLVQAGGSLRLSCAASGSISDTSLMGWYRQAPGKEREFVAGINLGTSTNYADSVKGRFTISRDNAKNTVYLQMNSLKPEDTAVYYCAVDLHYETSHFYWGQGTQVTVSS

SEQ ID NO: 39301 - protein, 121 aa, Artificial Sequence
  Chemically Synthesized
QVQLQESGGGLVQAGGSLRLSCAASGNIFYGDNMGWYRQAPGKERELVASIAWGGTTYYADSVKGRFTISRDNAKNTVYLQMNSLKPEDTAVYYCAAALTLYGGTNRVYYWGQGTQVTVSS

SEQ ID NO: 39302 - protein, 122 aa, Artificial Sequence
  Chemically Synthesized
QVQLQESGGGLVQAGGSLRLSCAASGNIFGYDFMGWYRQAPGKERELVAGIGNGGSTYYADSVKGRFTISRDNAKNTVYLQMNSLKPEDTAVYYCAVGYFWASRVYGVHGYWGQGTQVTVSS

SEQ ID NO: 39303 - protein, 112 aa, Artificial Sequence
  Chemically Synthesized
QVQLQESGGGLVQAGGSLRLSCAASGNISSYYTMGWYRQAPGKEREFVAGIGDGATTNYADSVKGRFTISRDNAKNTVYLQMNSLKPEDTAVYYCAVGFPYWGQGTQVTVSS

SEQ ID NO: 39304 - protein, 118 aa, Artificial Sequence
  Chemically Synthesized
QVQLQESGGGLVQAGGSLRLSCAASGSIFVRPQMGWYRQAPGKEREFVATIGDGTITYYADSVKGRFTISRDNAKNTVYLQMNSLKPEDTAVYYCAAYRRRSPVYAYWGQGTQVTVSS

SEQ ID NO: 39305 - protein, 118 aa, Artificial Sequence
  Chemically Synthesized
QVQLQESGGGLVQAGGSLRLSCAASGNIFDANIMGWYRQAPGKEREFVASIAYGTNTYYADSVKGRFTISRDNAKNTVYLQMNSLKPEDTAVYYCAVLYLYVHRHYYWGQGTQVTVSS

SEQ ID NO: 39306 - protein, 114 aa, Artificial Sequence
  Chemically Synthesized
QVQLQESGGGLVQAGGSLRLSCAASGTISRRYEMGWYRQAPGKEREFVASIGYGSNTYYADSVKGRFTISRDNAKNTVYLQMNSLKPEDTAVYYCAVEDIHTYWGQGTQVTVSS

SEQ ID NO: 39307 - protein, 121 aa, Artificial Sequence
  Chemically Synthesized
QVQLQESGGGLVQAGGSLRLSCAASGTISDSYMGWYRQAPGKEREFVASINWGGTTYYADSVKGRFTISRDNAKNTVYLQMNSLKPEDTAVYYCAVTPSEPYFGYPPFYYWGQGTQVTVSS

SEQ ID NO: 39308 - protein, 126 aa, Artificial Sequence
  Chemically Synthesized
QVQLQESGGGLVQAGGSLRLSCAASGTIFVVQIMGWYRQAPGKERELVAAINRGAITNYADSVKGRFTISRDNAKNTVYLQMNSLKPEDTAVYYCAVYRGVGYAFYNLLDQGYRYWGQGTQVTVSS

SEQ ID NO: 39309 - protein, 118 aa, Artificial Sequence
  Chemically Synthesized
QVQLQESGGGLVQAGGSLRLSCAASGTIFKRHRMGWYRQAPGKERELVAAIGRGGTTYYADSVKGRFTISRDNAKNTVYLQMNSLKPEDTAVYYCAAIRLHNVWFSYWGQGTQVTVSS

SEQ ID NO: 39310 - protein, 117 aa, Artificial Sequence
  Chemically Synthesized
QVQLQESGGGLVQAGGSLRLSCAASGNISAPFTMGWYRQAPGKERELLPLLITVVVPYADSVKGRFTISRDNAKNTVYLQMNSLKPEDTAVYYCAANVPSYGDHPYWGQGTQVTVSS

SEQ ID NO: 39311 - protein, 119 aa, Artificial Sequence
  Chemically Synthesized
QVQLQESGGGLVQAGGSLRLSCAASGNISWFYTYMGWYRQAPGKEREFVASITYGAITYYADSVKGRFTISRDNAKNTVYLQMNSLKPEDTAVYYCAVATDHSKDLKYWGQGTQVTVSS

SEQ ID NO: 39312 - protein, 121 aa, Artificial Sequence
  Chemically Synthesized
QVQLQESGGGLVQAGGSLRLSCAASGYISWLGMGWYRQAPGKERELVAGIASGTITYYADSVKGRFTISRDNAKNTVYLQMNSLKPEDTAVYYCAVDWYPANVDPRHYDYWGQGTQVTVSS

SEQ ID NO: 39313 - protein, 118 aa, Artificial Sequence
  Chemically Synthesized
QVQLQESGGGLVQAGGSLRLSCAASGNISYISYMGWYRQAPGKERELVATISQGASTYYADSVKGRFTISRDNAKNTVYLQMNSLKPEDTAVYYCAAYPVQRWGFAYWGQGTQVTVSS

SEQ ID NO: 39314 - protein, 126 aa, Artificial Sequence
  Chemically Synthesized
QVQLQESGGGLVQAGGSLRLSCAASGTIFSYYLMGWYRQAPGKEREFVAGISHGGITYYADSVKGRFTISRDNAKNTVYLQMNSLKPEDTAVYYCAVRYYQQYVLTVIHRRTYQYWGQGTQVTVSS

SEQ ID NO: 39315 - protein, 118 aa, Artificial Sequence
  Chemically Synthesized
QVQLQESGGGLVQAGGSLRLSCAASGSISTVIIMGWYRQAPGKEREFVATIATGGNTYYADSVKGRFTISRDNAKNTVYLQMNSLKPEDTAVYYCAVSSYNIYGHAYWGQGTQVTVSS

SEQ ID NO: 39316 - protein, 125 aa, Artificial Sequence
  Chemically Synthesized
QVQLQESGGGLVQAGGSLRLSCAASGNISYQYGMGWYRQAPGKERELVAGITSGANTNYADSVKGRFTISRDNAKNTVYLQMNSLKPEDTAVYYCAAGTAAYTAGYTVDAVNQYWGQGTQVTVSS

SEQ ID NO: 39317 - protein, 121 aa, Artificial Sequence
  Chemically Synthesized
QVQLQESGGGLVQAGGSLRLSCAASGTIFRRYYMGWYRQAPGKERELVASINQGGSTNYADSVKGRFTISRDNAKNTVYLQMNSLKPEDTAVYYCAAPPPIYANWHQHGYWGQGTQVTVSS

SEQ ID NO: 39318 - protein, 125 aa, Artificial Sequence
  Chemically Synthesized
QVQLQESGGGLVQAGGSLRLSCAASGSISSLVMGWYRQAPGKEREFVATINRGSTTNYADSVKGRFTISRDNAKNTVYLQMNSLKPEDTAVYYCAVLLTYGNGWTITAIGTYDYWGQGTQVTVSS

SEQ ID NO: 39319 - protein, 117 aa, Artificial Sequence
  Chemically Synthesized
QVQLQESGGGLVQAGGSLRLSCAASGNIFFDSMGWYRQAPGKERELVAAIAPGASTNYADSVKGRFTISRDNAKNTVYLQMNSLKPEDTAVYYCAVSDGPSNVHEYWGQGTQVTVSS

SEQ ID NO: 39320 - protein, 118 aa, Artificial Sequence
  Chemically Synthesized
QVQLQESGGGLVQAGGSLRLSCAASGYISVLRTMGWYRQAPGKEREFVAAIGRGGTTYYADSVKGRFTISRDNAKNTVYLQMNSLKPEDTAVYYCAAYGWTRLRYPYWGQGTQVTVSS

SEQ ID NO: 39321 - protein, 122 aa, Artificial Sequence
  Chemically Synthesized
QVQLQESGGGLVQAGGSLRLSCAASGNIFDYYYMGWYRQAPGKERELVASIAVGATTNYADSVKGRFTISRDNAKNTVYLQMNSLKPEDTAVYYCAVQASDQHYYQPQHYYWGQGTQVTVSS

SEQ ID NO: 39322 - protein, 118 aa, Artificial Sequence
  Chemically Synthesized
QVQLQESGGGLVQAGGSLRLSCAASGYISGVTYMGWYRQAPGKERELVAGINQGGTTNYADSVKGRFTISRDNAKNTVYLQMNSLKPEDTAVYYCAVSHTTVQWLPYWGQGTQVTVSS

SEQ ID NO: 39323 - protein, 118 aa, Artificial Sequence
  Chemically Synthesized
QVQLQESGGGLVQAGGSLRLSCAASGSISDVTYMGWYRQAPGKERELVAGIGRGATTYYADSVKGRFTISRDNAKNTVYLQMNSLKPEDTAVYYCAVETVYVIQHFYWGQGTQVTVSS

SEQ ID NO: 39324 - protein, 110 aa, Artificial Sequence
  Chemically Synthesized
QVQLQESGGGLVQAGGSLRLSCAASGSISHYRRMGWYRQAPGKEREFVATISSVVLPYADSVKGRFTISRDNAKNTVYLQMNSLKPEDTAVYYCAVPSYWGQGTQVTVSS

SEQ ID NO: 39325 - protein, 122 aa, Artificial Sequence
  Chemically Synthesized
QVQLQESGGGLVQAGGSLRLSCAASGTISSYQYMGWYRQAPGKERELVAGIDAGGTTYYADSVKGRFTISRDNAKNTVYLQMNSLKPEDTAVYYCAASADPYDRLQWNYGYWGQGTQVTVSS

SEQ ID NO: 39326 - protein, 121 aa, Artificial Sequence
  Chemically Synthesized
QVQLQESGGGLVQAGGSLRLSCAASGYIFSLRMGWYRQAPGKEREFVASIALGTSTNYADSVKGRFTISRDNAKNTVYLQMNSLKPEDTAVYYCAAEGYGATAIDRVHAYWGQGTQVTVSS

SEQ ID NO: 39327 - protein, 122 aa, Artificial Sequence
  Chemically Synthesized
QVQLQESGGGLVQAGGSLRLSCAASGYIFRDPDMGWYRQAPGKEREFVATISYGGSTYYADSVKGRFTISRDNAKNTVYLQMNSLKPEDTAVYYCAAVLDFLLQLYPGLLYWGQGTQVTVSS

SEQ ID NO: 39328 - protein, 118 aa, Artificial Sequence
  Chemically Synthesized
QVQLQESGGGLVQAGGSLRLSCAASGNIFAVFVMGWYRQAPGKEREFVAAIAYGANTYYADSVKGRFTISRDNAKNTVYLQMNSLKPEDTAVYYCAVGDVRRTAYTYWGQGTQVTVSS

SEQ ID NO: 39329 - protein, 118 aa, Artificial Sequence
  Chemically Synthesized
QVQLQESGGGLVQAGGSLRLSCAASGNISGRYDMGWYRQAPGKERELVASIAQGTTTNYADSVKGRFTISRDNAKNTVYLQMNSLKPEDTAVYYCAVGDIDRDYLAYWGQGTQVTVSS

SEQ ID NO: 39330 - protein, 122 aa, Artificial Sequence
  Chemically Synthesized
QVQLQESGGGLVQAGGSLRLSCAASGSISLWSFMGWYRQAPGKERELVASIAYGGNTYYADSVKGRFTISRDNAKNTVYLQMNSLKPEDTAVYYCAVYAYDDDGDWVWLVYWGQGTQVTVSS

SEQ ID NO: 39331 - protein, 114 aa, Artificial Sequence
  Chemically Synthesized
QVQLQESGGGLVQAGGSLRLSCAASGTISIRTYMGWYRQAPGKERELVATITPGATTNYADSVKGRFTISRDNAKNTVYLQMNSLKPEDTAVYYCARLQYHPYWGQGTQVTVSS

SEQ ID NO: 39332 - protein, 118 aa, Artificial Sequence
  Chemically Synthesized
QVQLQESGGGLVQAGGSLRLSCAASGNISQDRDMGWYRQAPGKEREFVAAIDQGSNTNYADSVKGRFTISRDNAKNTVYLQMNSLKPEDTAVYYCAAGWDEPSDLKYWGQGTQVTVSS

SEQ ID NO: 39333 - protein, 117 aa, Artificial Sequence
  Chemically Synthesized
QVQLQESGGGLVQAGGSLRLSCAASGTISISLDMGWYRQAPGKERELVAGIAYGTITNYADSVKGRFTISRDNAKNTVYLQMNSLKPEDTAVYYCAVRDYASLTLYWGQGTQVTVSS

SEQ ID NO: 39334 - protein, 122 aa, Artificial Sequence
  Chemically Synthesized
QVQLQESGGGLVQAGGSLRLSCAASGNISYTLAMGWYRQAPGKERELVAAITTGSITNYADSVKGRFTISRDNAKNTVYLQMNSLKPEDTAVYYCAADRVYVDDTLGNLRYWGQGTQVTVSS

SEQ ID NO: 39335 - protein, 125 aa, Artificial Sequence
  Chemically Synthesized
QVQLQESGGGLVQAGGSLRLSCAASGSISTHTMGWYRQAPGKERELVAAISYGGSTYYADSVKGRFTISRDNAKNTVYLQMNSLKPEDTAVYYCAAVTGNHRWSLRGGGIYHEYWGQGTQVTVSS

SEQ ID NO: 39336 - protein, 122 aa, Artificial Sequence
  Chemically Synthesized
QVQLQESGGGLVQAGGSLRLSCAASGYISYNNAMGWYRQAPGKERELVAGITGGSSTYYADSVKGRFTISRDNAKNTVYLQMNSLKPEDTAVYYCAAWDTASYYGWDYFGYWGQGTQVTVSS

SEQ ID NO: 39337 - protein, 117 aa, Artificial Sequence
  Chemically Synthesized
QVQLQESGGGLVQAGGSLRLSCAASGNISYYRFMGWYRQAPGKERELVATITHGTNTNYADSVKGRFTISRDNAKNTVYLQMNSLKPEDTAVYYCAARRPSSRTLYWGQGTQVTVSS

SEQ ID NO: 39338 - protein, 118 aa, Artificial Sequence
  Chemically Synthesized
QVQLQESGGGLVQAGGSLRLSCAASGSIFGPGWMGWYRQAPGKERELVAAITVGTITNYADSVKGRFTISRDNAKNTVYLQMNSLKPEDTAVYYCAATGGYRDGYDYWGQGTQVTVSS

SEQ ID NO: 39339 - protein, 111 aa, Artificial Sequence
  Chemically Synthesized
QVQLQESGGGLVQAGGSLRLSCAASGTISVYYGMGWYRQAPGKERELVAAINDGSTTYYADSVKGRFTISRDNAKNTVYLQMNSLKPEDTAVYYCAAVSYWGQGTQVTVSS

SEQ ID NO: 39340 - protein, 122 aa, Artificial Sequence
  Chemically Synthesized
QVQLQESGGGLVQAGGSLRLSCAASGNISDYRYMGWYRQAPGKERELVASISWGANTYYADSVKGRFTISRDNAKNTVYLQMNSLKPEDTAVYYCAVRHANPYSYFAQLIYWGQGTQVTVSS

SEQ ID NO: 39341 - protein, 122 aa, Artificial Sequence
  Chemically Synthesized
QVQLQESGGGLVQAGGSLRLSCAASGTISVYYYMGWYRQAPGKEREFVAAIAEGGNTNYADSVKGRFTISRDNAKNTVYLQMNSLKPEDTAVYYCAADTYTNFPYTGDYYYWGQGTQVTVSS

SEQ ID NO: 39342 - protein, 118 aa, Artificial Sequence
  Chemically Synthesized
QVQLQESGGGLVQAGGSLRLSCAASGNIFYYYYMGWYRQAPGKEREFVAAIAYGSNTYYADSVKGRFTISRDNAKNTVYLQMNSLKPEDTAVYYCAVDWWSVIYLDYWGQGTQVTVSS

SEQ ID NO: 39343 - protein, 122 aa, Artificial Sequence
  Chemically Synthesized
QVQLQESGGGLVQAGGSLRLSCAASGYISLVVYMGWYRQAPGKEREFVATISDGTSTYYADSVKGRFTISRDNAKNTVYLQMNSLKPEDTAVYYCAVVDLVWALTQGYYHYWGQGTQVTVSS

SEQ ID NO: 39344 - protein, 126 aa, Artificial Sequence
  Chemically Synthesized
QVQLQESGGGLVQAGGSLRLSCAASGSISTYAKMGWYRQAPGKEREFVAAIDRGTSTNYADSVKGRFTISRDNAKNTVYLQMNSLKPEDTAVYYCAAYGWGEPYGEFDPSWTYEYWGQGTQVTVSS

SEQ ID NO: 39345 - protein, 122 aa, Artificial Sequence
  Chemically Synthesized
QVQLQESGGGLVQAGGSLRLSCAASGSISYHAEMGWYRQAPGKEREFVATINDGTSTNYADSVKGRFTISRDNAKNTVYLQMNSLKPEDTAVYYCAVWPVGSTVLDPVPYYWGQGTQVTVSS

SEQ ID NO: 39346 - protein, 119 aa, Artificial Sequence
  Chemically Synthesized
QVQLQESGGGLVQAGGSLRLSCAASGNISASYAMGWYRQAPGKEREFVATIGYGTSTYYADSVKGRFTISRDNAKNTVYLQMNSLKPEDTAVYYCAVYDRYQYATYDYWGQGTQVTVSS

SEQ ID NO: 39347 - protein, 109 aa, Artificial Sequence
  Chemically Synthesized
QVQLQESGGGLVQAGGSLRLSCAASGSISATIDMGWYRQAPGKERELVPYADSVKGRFTISRDNAKNTVYLQMNSLKPEDTAVYYCAAAVTDTFYLQYWGQGTQVTVSS

SEQ ID NO: 39348 - protein, 122 aa, Artificial Sequence
  Chemically Synthesized
QVQLQESGGGLVQAGGSLRLSCAASGYISYEPYMGWYRQAPGKERELVAGIDYGAITNYADSVKGRFTISRDNAKNTVYLQMNSLKPEDTAVYYCAVHADLYYADIAILVYWGQGTQVTVSS

SEQ ID NO: 39349 - protein, 118 aa, Artificial Sequence
  Chemically Synthesized
QVQLQESGGGLVQAGGSLRLSCAASGYISGAVTMGWYRQAPGKERELVAAIGLGTSTNYADSVKGRFTISRDNAKNTVYLQMNSLKPEDTAVYYCAARYTRESYLHYWGQGTQVTVSS

SEQ ID NO: 39350 - protein, 122 aa, Artificial Sequence
  Chemically Synthesized
QVQLQESGGGLVQAGGSLRLSCAASGTISPWATMGWYRQAPGKERELVASIGHGTTTYYADSVKGRFTISRDNAKNTVYLQMNSLKPEDTAVYYCAADYIPSQYANALFRYWGQGTQVTVSS

SEQ ID NO: 39351 - protein, 118 aa, Artificial Sequence
  Chemically Synthesized
QVQLQESGGGLVQAGGSLRLSCAASGTISRDYDMGWYRQAPGKERELVASIDAGANTNYADSVKGRFTISRDNAKNTVYLQMNSLKPEDTAVYYCAVYVYQYGGHTYWGQGTQVTVSS

SEQ ID NO: 39352 - protein, 116 aa, Artificial Sequence
  Chemically Synthesized
QVQLQESGGGLVQAGGSLRLSCAASGSISYGYMGWYRQAPGKERELVASINNGTITYYADSVKGRFTISRDNAKNTVYLQMNSLKPEDTAVYYCAVDYYYLSYDYWGQGTQVTVSS

SEQ ID NO: 39353 - protein, 118 aa, Artificial Sequence
  Chemically Synthesized
QVQLQESGGGLVQAGGSLRLSCAASGYISTYYFMGWYRQAPGKERELVAGITFGTNTYYADSVKGRFTISRDNAKNTVYLQMNSLKPEDTAVYYCAAYYRDDNGYRYWGQGTQVTVSS

SEQ ID NO: 39354 - protein, 118 aa, Artificial Sequence
  Chemically Synthesized
QVQLQESGGGLVQAGGSLRLSCAASGSIFQRVIMGWYRQAPGKERELVASIDDGGSTNYADSVKGRFTISRDNAKNTVYLQMNSLKPEDTAVYYCAVYYIDSGGHAYWGQGTQVTVSS

SEQ ID NO: 39355 - protein, 121 aa, Artificial Sequence
  Chemically Synthesized
QVQLQESGGGLVQAGGSLRLSCAASGNISYYYYMGWYRQAPGKERELLPVLLLVVVPYADSVKGRFTISRDNAKNTVYLQMNSLKPEDTAVYYCAANKAVRTGQSWDLYYWGQGTQVTVSS

SEQ ID NO: 39356 - protein, 118 aa, Artificial Sequence
  Chemically Synthesized
QVQLQESGGGLVQAGGSLRLSCAASGYIFGTYYMGWYRQAPGKEREFVASIGTGASTNYADSVKGRFTISRDNAKNTVYLQMNSLKPEDTAVYYCAVSSDWNALLWYWGQGTQVTVSS

SEQ ID NO: 39357 - protein, 125 aa, Artificial Sequence
  Chemically Synthesized
QVQLQESGGGLVQAGGSLRLSCAASGNIFDFNPMGWYRQAPGKERELVASIDYGSSTYYADSVKGRFTISRDNAKNTVYLQMNSLKPEDTAVYYCAAYSGQYYSEVDGNVRLDYWGQGTQVTVSS

SEQ ID NO: 39358 - protein, 118 aa, Artificial Sequence
  Chemically Synthesized
QVQLQESGGGLVQAGGSLRLSCAASGTIFRPSQMGWYRQAPGKERELVATITGGTNTNYADSVKGRFTISRDNAKNTVYLQMNSLKPEDTAVYYCAAEDITLGQHSYWGQGTQVTVSS

SEQ ID NO: 39359 - protein, 118 aa, Artificial Sequence
  Chemically Synthesized
QVQLQESGGGLVQAGGSLRLSCAASGTISVYDQMGWYRQAPGKERELVATITYGGTTNYADSVKGRFTISRDNAKNTVYLQMNSLKPEDTAVYYCAVATGPAGAHRYWGQGTQVTVSS

SEQ ID NO: 39360 - protein, 118 aa, Artificial Sequence
  Chemically Synthesized
QVQLQESGGGLVQAGGSLRLSCAASGYISSYYSMGWYRQAPGKEREFVAAIGYGAITYYADSVKGRFTISRDNAKNTVYLQMNSLKPEDTAVYYCAATKYGWLYLPYWGQGTQVTVSS

SEQ ID NO: 39361 - protein, 122 aa, Artificial Sequence
  Chemically Synthesized
QVQLQESGGGLVQAGGSLRLSCAASGTISPGHRMGWYRQAPGKERELVAAIAYGTTTYYADSVKGRFTISRDNAKNTVYLQMNSLKPEDTAVYYCAAFYINYYDTYPPFKYWGQGTQVTVSS

SEQ ID NO: 39362 - protein, 122 aa, Artificial Sequence
  Chemically Synthesized
QVQLQESGGGLVQAGGSLRLSCAASGSISYALYMGWYRQAPGKEREFVAAIDGGGITYYADSVKGRFTISRDNAKNTVYLQMNSLKPEDTAVYYCAAGDQYEDWGGISLSYWGQGTQVTVSS

SEQ ID NO: 39363 - protein, 122 aa, Artificial Sequence
  Chemically Synthesized
QVQLQESGGGLVQAGGSLRLSCAASGTISSKTYMGWYRQAPGKERELVASIDTGGTTYYADSVKGRFTISRDNAKNTVYLQMNSLKPEDTAVYYCAATEDEIDVADRYHGYWGQGTQVTVSS

SEQ ID NO: 39364 - protein, 121 aa, Artificial Sequence
  Chemically Synthesized
QVQLQESGGGLVQAGGSLRLSCAASGNISLRSLMGWYRQAPGKEREFVASLVVVVLPYADSVKGRFTISRDNAKNTVYLQMNSLKPEDTAVYYCAATTGYAAAEWGDHWYWGQGTQVTVSS

SEQ ID NO: 39365 - protein, 118 aa, Artificial Sequence
  Chemically Synthesized
QVQLQESGGGLVQAGGSLRLSCAASGNISRRRYMGWYRQAPGKEREFVATIAGGATTNYADSVKGRFTISRDNAKNTVYLQMNSLKPEDTAVYYCAADYTNYIYFWYWGQGTQVTVSS

SEQ ID NO: 39366 - protein, 118 aa, Artificial Sequence
  Chemically Synthesized
QVQLQESGGGLVQAGGSLRLSCAASGTIFPYGWMGWYRQAPGKEREFVATIAPGTNTNYADSVKGRFTISRDNAKNTVYLQMNSLKPEDTAVYYCAVGAWDGGRHSYWGQGTQVTVSS

SEQ ID NO: 39367 - protein, 126 aa, Artificial Sequence
  Chemically Synthesized
QVQLQESGGGLVQAGGSLRLSCAASGTIFLDYDMGWYRQAPGKERELVAAIASGASTNYADSVKGRFTISRDNAKNTVYLQMNSLKPEDTAVYYCAAYGPHDYYRTTAEDEDYQYWGQGTQVTVSS

SEQ ID NO: 39368 - protein, 125 aa, Artificial Sequence
  Chemically Synthesized
QVQLQESGGGLVQAGGSLRLSCAASGYISTDVYMGWYRQAPGKEREFVAGITPGANTNYADSVKGRFTISRDNAKNTVYLQMNSLKPEDTAVYYCAVYHLHYLTHGRATDWFDYWGQGTQVTVSS

SEQ ID NO: 39369 - protein, 118 aa, Artificial Sequence
  Chemically Synthesized
QVQLQESGGGLVQAGGSLRLSCAASGYISVWSIMGWYRQAPGKEREFVATIGLGGNTNYADSVKGRFTISRDNAKNTVYLQMNSLKPEDTAVYYCAAAILRGDRHLYWGQGTQVTVSS

SEQ ID NO: 39370 - protein, 126 aa, Artificial Sequence
  Chemically Synthesized
QVQLQESGGGLVQAGGSLRLSCAASGSISLDDLMGWYRQAPGKEREFVATIAYGGSTNYADSVKGRFTISRDNAKNTVYLQMNSLKPEDTAVYYCAVTRQVLFYGYSLESYYHPYWGQGTQVTVSS

SEQ ID NO: 39371 - protein, 125 aa, Artificial Sequence
  Chemically Synthesized
QVQLQESGGGLVQAGGSLRLSCAASGYISSWVRMGWYRQAPGKERELVAAIAHGSSTYYADSVKGRFTISRDNAKNTVYLQMNSLKPEDTAVYYCAAHNALYDPGWVMLTSTMYWGQGTQVTVSS

SEQ ID NO: 39372 - protein, 115 aa, Artificial Sequence
  Chemically Synthesized
QVQLQESGGGLVQAGGSLRLSCAASGSISIFAPMGWYRQAPGKERELVALRVLLPYADSVKGRFTISRDNAKNTVYLQMNSLKPEDTAVYYCAVKDSVYDYFRYWGQGTQVTVSS

SEQ ID NO: 39373 - protein, 117 aa, Artificial Sequence
  Chemically Synthesized
QVQLQESGGGLVQAGGSLRLSCAASGNISRAVDMGWYRQAPGKERELVASIADGTTTNYADSVKGRFTISRDNAKNTVYLQMNSLKPEDTAVYYCAAWYGKQHHNYWGQGTQVTVSS

SEQ ID NO: 39374 - protein, 118 aa, Artificial Sequence
  Chemically Synthesized
QVQLQESGGGLVQAGGSLRLSCAASGSIFQDTRMGWYRQAPGKERELVAAIDYGGNTNYADSVKGRFTISRDNAKNTVYLQMNSLKPEDTAVYYCAAGEYLVDPHVYWGQGTQVTVSS

SEQ ID NO: 39375 - protein, 118 aa, Artificial Sequence
  Chemically Synthesized
QVQLQESGGGLVQAGGSLRLSCAASGSISYTTGMGWYRQAPGKEREFVAAIGQGTITNYADSVKGRFTISRDNAKNTVYLQMNSLKPEDTAVYYCAVWPATRDAHYYWGQGTQVTVSS

SEQ ID NO: 39376 - protein, 122 aa, Artificial Sequence
  Chemically Synthesized
QVQLQESGGGLVQAGGSLRLSCAASGSISAQTSMGWYRQAPGKEREFVAAIDDGASTNYADSVKGRFTISRDNAKNTVYLQMNSLKPEDTAVYYCAVARDTTIATWPGFTYWGQGTQVTVSS

SEQ ID NO: 39377 - protein, 121 aa, Artificial Sequence
  Chemically Synthesized
QVQLQESGGGLVQAGGSLRLSCAASGNISATFAMGWYRQAPGKERELVAGISSGAYLYADSVKGRFTISRDNAKNTVYLQMNSLKPEDTAVYYCAVQSEFQSQGEAWYQYWGQGTQVTVSS

SEQ ID NO: 39378 - protein, 112 aa, Artificial Sequence
  Chemically Synthesized
QVQLQESGGGLVQAGGSLRLSCAASGYISDNVGMGWYRQAPGKERELVASIGFGSSTNYADSVKGRFTISRDNAKNTVYLQMNSLKPEDTAVYYCARDYYYWGQGTQVTVSS

SEQ ID NO: 39379 - protein, 117 aa, Artificial Sequence
  Chemically Synthesized
QVQLQESGGGLVQAGGSLRLSCAASGTIFHYTDMGWYRQAPGKERELVASIGQVVLPYADSVKGRFTISRDNAKNTVYLQMNSLKPEDTAVYYCAVETVYSYGYLYWGQGTQVTVSS

SEQ ID NO: 39380 - protein, 118 aa, Artificial Sequence
  Chemically Synthesized
QVQLQESGGGLVQAGGSLRLSCAASGTISFGTIMGWYRQAPGKEREFVATIADGANTNYADSVKGRFTISRDNAKNTVYLQMNSLKPEDTAVYYCAVDTVWDRGFDYWGQGTQVTVSS

SEQ ID NO: 39381 - protein, 121 aa, Artificial Sequence
  Chemically Synthesized
QVQLQESGGGLVQAGGSLRLSCAASGTIFDDLLMGWYRQAPGKEREFVASISIGTNTYYADSVKGRFTISRDNAKNTVYLQMNSLKPEDTAVYYCAAQQQYVWDYPYLLYWGQGTQVTVSS

SEQ ID NO: 39382 - protein, 121 aa, Artificial Sequence
  Chemically Synthesized
QVQLQESGGGLVQAGGSLRLSCAASGSISGYPLMGWYRQAPGKERELVATITSVVLPYADSVKGRFTISRDNAKNTVYLQMNSLKPEDTAVYYCAVSPYGGTYDARNFVYWGQGTQVTVSS

SEQ ID NO: 39383 - protein, 117 aa, Artificial Sequence
  Chemically Synthesized
QVQLQESGGGLVQAGGSLRLSCAASGNIFRSYMGWYRQAPGKERELVAAIDFGGITNYADSVKGRFTISRDNAKNTVYLQMNSLKPEDTAVYYCAAGRAEQTRHSYWGQGTQVTVSS

SEQ ID NO: 39384 - protein, 118 aa, Artificial Sequence
  Chemically Synthesized
QVQLQESGGGLVQAGGSLRLSCAASGNISSQSPMGWYRQAPGKEREFVAAISRGGTTYYADSVKGRFTISRDNAKNTVYLQMNSLKPEDTAVYYCAAAWSGNTSLTYWGQGTQVTVSS

SEQ ID NO: 39385 - protein, 125 aa, Artificial Sequence
  Chemically Synthesized
QVQLQESGGGLVQAGGSLRLSCAASGTISDSDAMGWYRQAPGKERELVASISGGGITYYADSVKGRFTISRDNAKNTVYLQMNSLKPEDTAVYYCAVVTGLRSERWNYDYALPYWGQGTQVTVSS

SEQ ID NO: 39386 - protein, 124 aa, Artificial Sequence
  Chemically Synthesized
QVQLQESGGGLVQAGGSLRLSCAASGSIFSTMGWYRQAPGKEREFVAAIGGGTITYYADSVKGRFTISRDNAKNTVYLQMNSLKPEDTAVYYCAVQSLRYHRDVYTYIGWLAYWGQGTQVTVSS

SEQ ID NO: 39387 - protein, 120 aa, Artificial Sequence
  Chemically Synthesized
QVQLQESGGGLVQAGGSLRLSCAASGTISDRTSMGWYRQAPGKEREFVATIDYGTSYADSVKGRFTISRDNAKNTVYLQMNSLKPEDTAVYYCAATWDVAEDYVSGFRYWGQGTQVTVSS

SEQ ID NO: 39388 - protein, 117 aa, Artificial Sequence
  Chemically Synthesized
QVQLQESGGGLVQAGGSLRLSCAASGNIFRIGNMGWYRQAPGKERELLPLLLLVLIPYADSVKGRFTISRDNAKNTVYLQMNSLKPEDTAVYYCAAPRPTTGAYTYWGQGTQVTVSS

SEQ ID NO: 39389 - protein, 121 aa, Artificial Sequence
  Chemically Synthesized
QVQLQESGGGLVQAGGSLRLSCAASGTILFVVMGWYRQAPGKEREFVATIDDGAITNYADSVKGRFTISRDNAKNTVYLQMNSLKPEDTAVYYCAVFITWRTPLYDNHYYWGQGTQVTVSS

SEQ ID NO: 39390 - protein, 111 aa, Artificial Sequence
  Chemically Synthesized
QVQLQESGGGLVQAGGSLRLSCAASGNISTGADMGWYRQAPGKEREFVAAISTGANTNYADSVKGRFTISRDNAKNTVYLQMNSLKPEDTAVYYCAYHFYWGQGTQVTVSS

SEQ ID NO: 39391 - protein, 126 aa, Artificial Sequence
  Chemically Synthesized
QVQLQESGGGLVQAGGSLRLSCAASGTISSTGIMGWYRQAPGKEREFVASINYGASTNYADSVKGRFTISRDNAKNTVYLQMNSLKPEDTAVYYCAVVGVAPQDYPSWDSVDHYYWGQGTQVTVSS

SEQ ID NO: 39392 - protein, 113 aa, Artificial Sequence
  Chemically Synthesized
QVQLQESGGGLVQAGGSLRLSCAASGTISMGWYRQAPGKEREFVAAIDRGGNTYADSVKGRFTISRDNAKNTVYLQMNSLKPEDTAVYYCAVADWTYRRHSYWGQGTQVTVSS

SEQ ID NO: 39393 - protein, 115 aa, Artificial Sequence
  Chemically Synthesized
QVQLQESGGGLVQAGGSLRLSCAASGSFLLRTMGWYRQAPGKEREFVATIGVLLPYADSVKGRFTISRDNAKNTVYLQMNSLKPEDTAVYYCAAYLYTDEYYYYWGQGTQVTVSS

SEQ ID NO: 39394 - protein, 117 aa, Artificial Sequence
  Chemically Synthesized
QVQLQESGGGLVQAGGSLRLSCAASGSISSIWGMGWYRQAPGKERELVASIAPGTNTNYADSVKGRFTISRDNAKNTVYLQMNSLKPEDTAVYYCAADTSTLTTFYWGQGTQVTVSS

SEQ ID NO: 39395 - protein, 113 aa, Artificial Sequence
  Chemically Synthesized
QVQLQESGGGLVQAGGSLRLSCAASGYISLTDYMGWYRQAPGKERELVASIDDGATTYYADSVKGRFTISRDNAKNTVYLQMNSLKPEDTAVYYCAFWTVIYWGQGTQVTVSS

SEQ ID NO: 39396 - protein, 117 aa, Artificial Sequence
  Chemically Synthesized
QVQLQESGGGLVQAGGSLRLSCAASGYISRRGGMGWYRQAPGKERELVATIAAGTNTYYADSVKGRFTISRDNAKNTVYLQMNSLKPEDTAVYYCAASNVRGTVFYWGQGTQVTVSS

SEQ ID NO: 39397 - protein, 118 aa, Artificial Sequence
  Chemically Synthesized
QVQLQESGGGLVQAGGSLRLSCAASGKFLSYTVMGWYRQAPGKEREFVAGIAIGSNTYYADSVKGRFTISRDNAKNTVYLQMNSLKPEDTAVYYCAVSRYYWRDHLYWGQGTQVTVSS

SEQ ID NO: 39398 - protein, 118 aa, Artificial Sequence
  Chemically Synthesized
QVQLQESGGGLVQAGGSLRLSCAASGNIFYSATMGWYRQAPGKEREFVASIGYGGNTYYADSVKGRFTISRDNAKNTVYLQMNSLKPEDTAVYYCAANERYSFLLPYWGQGTQVTVSS

SEQ ID NO: 39399 - protein, 126 aa, Artificial Sequence
  Chemically Synthesized
QVQLQESGGGLVQAGGSLRLSCAASGTISPFDKMGWYRQAPGKERELVAAIAAGTSTYYADSVKGRFTISRDNAKNTVYLQMNSLKPEDTAVYYCAVRYLYYYPDSGNYDRYHVYWGQGTQVTVSS

SEQ ID NO: 39400 - protein, 122 aa, Artificial Sequence
  Chemically Synthesized
QVQLQESGGGLVQAGGSLRLSCAASGTISPVYYMGWYRQAPGKERELVAGIAYGASTNYADSVKGRFTISRDNAKNTVYLQMNSLKPEDTAVYYCAVDYKDATSATVAFGYWGQGTQVTVSS

SEQ ID NO: 39401 - protein, 125 aa, Artificial Sequence
  Chemically Synthesized
QVQLQESGGGLVQAGGSLRLSCAASGSIFTVVMGWYRQAPGKEREFVAGIAPGAITYYADSVKGRFTISRDNAKNTVYLQMNSLKPEDTAVYYCAADVKDNIVSYYGRAYAHSYWGQGTQVTVSS

SEQ ID NO: 39402 - protein, 118 aa, Artificial Sequence
  Chemically Synthesized
QVQLQESGGGLVQAGGSLRLSCAASGYIFDGYIMGWYRQAPGKERELVATITIGSITNYADSVKGRFTISRDNAKNTVYLQMNSLKPEDTAVYYCAVDDRRLNWLAYWGQGTQVTVSS

SEQ ID NO: 39403 - protein, 122 aa, Artificial Sequence
  Chemically Synthesized
QVQLQESGGGLVQAGGSLRLSCAASGSISASRYMGWYRQAPGKERELVASITRGSNTYYADSVKGRFTISRDNAKNTVYLQMNSLKPEDTAVYYCAARRVRTYGSESYHRYWGQGTQVTVSS

SEQ ID NO: 39404 - protein, 122 aa, Artificial Sequence
  Chemically Synthesized
QVQLQESGGGLVQAGGSLRLSCAASGYISDWSYMGWYRQAPGKEREFVAGISNGTNTNYADSVKGRFTISRDNAKNTVYLQMNSLKPEDTAVYYCAVDYRPSHTPGAILVYWGQGTQVTVSS

SEQ ID NO: 39405 - protein, 122 aa, Artificial Sequence
  Chemically Synthesized
QVQLQESGGGLVQAGGSLRLSCAASGNISLYHYMGWYRQAPGKERELVATINRGGNTNYADSVKGRFTISRDNAKNTVYLQMNSLKPEDTAVYYCAVLYAYEYHKYTDHGYWGQGTQVTVSS

SEQ ID NO: 39406 - protein, 122 aa, Artificial Sequence
  Chemically Synthesized
QVQLQESGGGLVQAGGSLRLSCAASGSIFRYTRMGWYRQAPGKERELVASIDPGGTTYYADSVKGRFTISRDNAKNTVYLQMNSLKPEDTAVYYCAAEIQNRGRGQYTFLYWGQGTQVTVSS

SEQ ID NO: 39407 - protein, 118 aa, Artificial Sequence
  Chemically Synthesized
QVQLQESGGGLVQAGGSLRLSCAASGSISYYPYMGWYRQAPGKERELVAGIAYGTNTYYADSVKGRFTISRDNAKNTVYLQMNSLKPEDTAVYYCAAYHYRSPNLDYWGQGTQVTVSS

SEQ ID NO: 39408 - protein, 118 aa, Artificial Sequence
  Chemically Synthesized
QVQLQESGGGLVQAGGSLRLSCAASGNIFRRSTMGWYRQAPGKEREFVAGINYGASTNYADSVKGRFTISRDNAKNTVYLQMNSLKPEDTAVYYCAVYKGGNRYHTYWGQGTQVTVSS

SEQ ID NO: 39409 - protein, 118 aa, Artificial Sequence
  Chemically Synthesized
QVQLQESGGGLVQAGGSLRLSCAASGNIFYWKDMGWYRQAPGKEREFVAAISYGSITNYADSVKGRFTISRDNAKNTVYLQMNSLKPEDTAVYYCAVARRHKAQFYYWGQGTQVTVSS

SEQ ID NO: 39410 - protein, 118 aa, Artificial Sequence
  Chemically Synthesized
QVQLQESGGGLVQAGGSLRLSCAASGSISVVFVMGWYRQAPGKEREFVAGITNGTNTYYADSVKGRFTISRDNAKNTVYLQMNSLKPEDTAVYYCAVLQFPGKGHDYWGQGTQVTVSS

SEQ ID NO: 39411 - protein, 122 aa, Artificial Sequence
  Chemically Synthesized
QVQLQESGGGLVQAGGSLRLSCAASGSISQWWYMGWYRQAPGKEREFVAGIGYGSNTYYADSVKGRFTISRDNAKNTVYLQMNSLKPEDTAVYYCAAHNFQGNFVGLDHDYWGQGTQVTVSS

SEQ ID NO: 39412 - protein, 118 aa, Artificial Sequence
  Chemically Synthesized
QVQLQESGGGLVQAGGSLRLSCAASGYISWHGKMGWYRQAPGKEREFVAAITYGTITYYADSVKGRFTISRDNAKNTVYLQMNSLKPEDTAVYYCAADLYLFLRHIYWGQGTQVTVSS

SEQ ID NO: 39413 - protein, 118 aa, Artificial Sequence
  Chemically Synthesized
QVQLQESGGGLVQAGGSLRLSCAASGYISQYAAMGWYRQAPGKERELVATISYGATTYYADSVKGRFTISRDNAKNTVYLQMNSLKPEDTAVYYCAVYDYIFSGLTYWGQGTQVTVSS

SEQ ID NO: 39414 - protein, 118 aa, Artificial Sequence
  Chemically Synthesized
QVQLQESGGGLVQAGGSLRLSCAASGSISRSYPMGWYRQAPGKEREFVAGIGIGSITYYADSVKGRFTISRDNAKNTVYLQMNSLKPEDTAVYYCAALYGRYTIHYYWGQGTQVTVSS

SEQ ID NO: 39415 - protein, 118 aa, Artificial Sequence
  Chemically Synthesized
QVQLQESGGGLVQAGGSLRLSCAASGTISSYYLMGWYRQAPGKEREFVAGINRGSTTYYADSVKGRFTISRDNAKNTVYLQMNSLKPEDTAVYYCAAHYWHDYDLDYWGQGTQVTVSS

SEQ ID NO: 39416 - protein, 122 aa, Artificial Sequence
  Chemically Synthesized
QVQLQESGGGLVQAGGSLRLSCAASGYIFSAAAMGWYRQAPGKEREFVAGINDGGTTYYADSVKGRFTISRDNAKNTVYLQMNSLKPEDTAVYYCAAYYYIGGSRRPLHRYWGQGTQVTVSS

SEQ ID NO: 39417 - protein, 118 aa, Artificial Sequence
  Chemically Synthesized
QVQLQESGGGLVQAGGSLRLSCAASGNIFRRSGMGWYRQAPGKEREFVAGIGDGSNTYYADSVKGRFTISRDNAKNTVYLQMNSLKPEDTAVYYCAVYTRAYITHRYWGQGTQVTVSS

SEQ ID NO: 39418 - protein, 120 aa, Artificial Sequence
  Chemically Synthesized
QVQLQESGGGLVQAGGSLRLSCAASGTISEYKLMGWYRQAPGKEREFVAGISYGASTYYADSVKGRFTISRDNAKNTVYLQMNSLKPEDTAVYYCAAFEAVFYVGYSDYWGQGTQVTVSS

SEQ ID NO: 39419 - protein, 118 aa, Artificial Sequence
  Chemically Synthesized
QVQLQESGGGLVQAGGSLRLSCAASGYIFWRKLMGWYRQAPGKEREFVAAIATGGITNYADSVKGRFTISRDNAKNTVYLQMNSLKPEDTAVYYCAAKRWTWPAHDYWGQGTQVTVSS

SEQ ID NO: 39420 - protein, 118 aa, Artificial Sequence
  Chemically Synthesized
QVQLQESGGGLVQAGGSLRLSCAASGNISVRDYMGWYRQAPGKERELVAAITYGGSTYYADSVKGRFTISRDNAKNTVYLQMNSLKPEDTAVYYCAVIPYYKPWFLYWGQGTQVTVSS

SEQ ID NO: 39421 - protein, 122 aa, Artificial Sequence
  Chemically Synthesized
QVQLQESGGGLVQAGGSLRLSCAASGTISHSYSMGWYRQAPGKEREFVAAIATGGTTYYADSVKGRFTISRDNAKNTVYLQMNSLKPEDTAVYYCAVPYVGRQIDRGDYYYWGQGTQVTVSS

SEQ ID NO: 39422 - protein, 118 aa, Artificial Sequence
  Chemically Synthesized
QVQLQESGGGLVQAGGSLRLSCAASGTISYTFLMGWYRQAPGKEREFVAAINNGTSTYYADSVKGRFTISRDNAKNTVYLQMNSLKPEDTAVYYCAVYVYQGHDHPYWGQGTQVTVSS

SEQ ID NO: 39423 - protein, 118 aa, Artificial Sequence
  Chemically Synthesized
QVQLQESGGGLVQAGGSLRLSCAASGYISVIYSMGWYRQAPGKEREFVAGINRGGNTYYADSVKGRFTISRDNAKNTVYLQMNSLKPEDTAVYYCAAFSFYRVSYRYWGQGTQVTVSS

SEQ ID NO: 39424 - protein, 118 aa, Artificial Sequence
  Chemically Synthesized
QVQLQESGGGLVQAGGSLRLSCAASGYISSRYGMGWYRQAPGKEREFVATISYGANTYYADSVKGRFTISRDNAKNTVYLQMNSLKPEDTAVYYCAAYVRRAHWFRYWGQGTQVTVSS

SEQ ID NO: 39425 - protein, 118 aa, Artificial Sequence
  Chemically Synthesized
QVQLQESGGGLVQAGGSLRLSCAASGNIFYRYIMGWYRQAPGKERELVATITSGSSTYYADSVKGRFTISRDNAKNTVYLQMNSLKPEDTAVYYCAVVSYGWRDHFYWGQGTQVTVSS

SEQ ID NO: 39426 - protein, 118 aa, Artificial Sequence
  Chemically Synthesized
QVQLQESGGGLVQAGGSLRLSCAASGNISGIQYMGWYRQAPGKEREFVATIGGGTSTYYADSVKGRFTISRDNAKNTVYLQMNSLKPEDTAVYYCAAYVLYRTYLRYWGQGTQVTVSS

SEQ ID NO: 39427 - protein, 118 aa, Artificial Sequence
  Chemically Synthesized
QVQLQESGGGLVQAGGSLRLSCAASGTISLYDLMGWYRQAPGKEREFVAGIATGAITYYADSVKGRFTISRDNAKNTVYLQMNSLKPEDTAVYYCAVVADWRYWYRYWGQGTQVTVSS

SEQ ID NO: 39428 - protein, 122 aa, Artificial Sequence
  Chemically Synthesized
QVQLQESGGGLVQAGGSLRLSCAASGTISGPIGMGWYRQAPGKEREFVAGIGFGGNTYYADSVKGRFTISRDNAKNTVYLQMNSLKPEDTAVYYCAVPLVGSVYGARWFGYWGQGTQVTVSS

SEQ ID NO: 39429 - protein, 118 aa, Artificial Sequence
  Chemically Synthesized
QVQLQESGGGLVQAGGSLRLSCAASGYIFSHRAMGWYRQAPGKEREFVAGISYGATTYYADSVKGRFTISRDNAKNTVYLQMNSLKPEDTAVYYCAVPFGYNYYHYYWGQGTQVTVSS

SEQ ID NO: 39430 - protein, 126 aa, Artificial Sequence
  Chemically Synthesized
QVQLQESGGGLVQAGGSLRLSCAASGYISARYYMGWYRQAPGKERELVAGINAGGSTYYADSVKGRFTISRDNAKNTVYLQMNSLKPEDTAVYYCAVVSWADSPRRDYATLGFKYWGQGTQVTVSS

SEQ ID NO: 39431 - protein, 126 aa, Artificial Sequence
  Chemically Synthesized
QVQLQESGGGLVQAGGSLRLSCAASGYISGGIEMGWYRQAPGKEREFVASIGWGGNTYYADSVKGRFTISRDNAKNTVYLQMNSLKPEDTAVYYCAAVSLSYYDPRETWDGYHDYWGQGTQVTVSS

SEQ ID NO: 39432 - protein, 118 aa, Artificial Sequence
  Chemically Synthesized
QVQLQESGGGLVQAGGSLRLSCAASGNIFGPWYMGWYRQAPGKERELVAGISLGGITYYADSVKGRFTISRDNAKNTVYLQMNSLKPEDTAVYYCAVVLRYWQPHGYWGQGTQVTVSS

SEQ ID NO: 39433 - protein, 118 aa, Artificial Sequence
  Chemically Synthesized
QVQLQESGGGLVQAGGSLRLSCAASGTIFNGWYMGWYRQAPGKEREFVAGIGQGSSTYYADSVKGRFTISRDNAKNTVYLQMNSLKPEDTAVYYCAAFSYYYYHYDYWGQGTQVTVSS

SEQ ID NO: 39434 - protein, 126 aa, Artificial Sequence
  Chemically Synthesized
QVQLQESGGGLVQAGGSLRLSCAASGYISYHATMGWYRQAPGKEREFVATIAYGASTNYADSVKGRFTISRDNAKNTVYLQMNSLKPEDTAVYYCAVADYRTINYYTYRLYYHFYWGQGTQVTVSS

SEQ ID NO: 39435 - protein, 118 aa, Artificial Sequence
  Chemically Synthesized
QVQLQESGGGLVQAGGSLRLSCAASGSISPFYAMGWYRQAPGKERELVAGIDYGSSTYYADSVKGRFTISRDNAKNTVYLQMNSLKPEDTAVYYCAVFNYGSAPHDYWGQGTQVTVSS

SEQ ID NO: 39436 - protein, 122 aa, Artificial Sequence
  Chemically Synthesized
QVQLQESGGGLVQAGGSLRLSCAASGYIFYTYGMGWYRQAPGKEREFVAGITIGSSTYYADSVKGRFTISRDNAKNTVYLQMNSLKPEDTAVYYCAARPYRSTAGLYALFYWGQGTQVTVSS

SEQ ID NO: 39437 - protein, 119 aa, Artificial Sequence
  Chemically Synthesized
QVQLQESGGGLVQAGGSLRLSCAASGSISGLYVMGWYRQAPGKERELVAAIGDGANTYYADSVKGRFTISRDNAKNTVYLQMNSLKPEDTAVYYCAAGTRSQRSAHRYWGQGTQVTVSS

SEQ ID NO: 39438 - protein, 122 aa, Artificial Sequence
  Chemically Synthesized
QVQLQESGGGLVQAGGSLRLSCAASGYISGRDYMGWYRQAPGKEREFVASISDGTSTNYADSVKGRFTISRDNAKNTVYLQMNSLKPEDTAVYYCAAGGDYVVIWYLYFRYWGQGTQVTVSS

SEQ ID NO: 39439 - protein, 116 aa, Artificial Sequence
  Chemically Synthesized
QVQLQESGGGLVQAGGSLRLSCAASGYIFLRLVMGWYRQAPGKERELVAGIDTGTTTYYADSVKGRFTISRDNAKNTVYLQMNSLKPEDTAVYYCAAITDTYYGYWGQGTQVTVSS

SEQ ID NO: 39440 - protein, 122 aa, Artificial Sequence
  Chemically Synthesized
QVQLQESGGGLVQAGGSLRLSCAASGTISGYLTMGWYRQAPGKEREFVAGIDYGASTYYADSVKGRFTISRDNAKNTVYLQMNSLKPEDTAVYYCAVVDRYRPDPSGYHAYWGQGTQVTVSS

SEQ ID NO: 39441 - protein, 122 aa, Artificial Sequence
  Chemically Synthesized
QVQLQESGGGLVQAGGSLRLSCAASGTISTVYGMGWYRQAPGKEREFVAGIGRGTITNYADSVKGRFTISRDNAKNTVYLQMNSLKPEDTAVYYCAAVIRLDSRYAGYLYYWGQGTQVTVSS

SEQ ID NO: 39442 - protein, 122 aa, Artificial Sequence
  Chemically Synthesized
QVQLQESGGGLVQAGGSLRLSCAASGYISGKWFMGWYRQAPGKEREFVASITNGGTTYYADSVKGRFTISRDNAKNTVYLQMNSLKPEDTAVYYCAVIYDDLAVDGHYYAYWGQGTQVTVSS

SEQ ID NO: 39443 - protein, 118 aa, Artificial Sequence
  Chemically Synthesized
QVQLQESGGGLVQAGGSLRLSCAASGSIFYVRYMGWYRQAPGKERELVASIAYGANTNYADSVKGRFTISRDNAKNTVYLQMNSLKPEDTAVYYCAVGRRGVRLFPYWGQGTQVTVSS

SEQ ID NO: 39444 - protein, 122 aa, Artificial Sequence
  Chemically Synthesized
QVQLQESGGGLVQAGGSLRLSCAASGNISSPYYMGWYRQAPGKEREFVAGINDGGSTNYADSVKGRFTISRDNAKNTVYLQMNSLKPEDTAVYYCAALYITISSRRIYLHYWGQGTQVTVSS

SEQ ID NO: 39445 - protein, 117 aa, Artificial Sequence
  Chemically Synthesized
QVQLQESGGGLVQAGGSLRLSCAASGTISPTDPMGWYRQAPGKEREFVAAITRGAITNYADSVKGRFTISRDNAKNTVYLQMNSLKPEDTAVYYCAAVVRYNLRYYWGQGTQVTVSS

SEQ ID NO: 39446 - protein, 122 aa, Artificial Sequence
  Chemically Synthesized
QVQLQESGGGLVQAGGSLRLSCAASGSISRNSYMGWYRQAPGKERELVASINDGGTTNYADSVKGRFTISRDNAKNTVYLQMNSLKPEDTAVYYCAAVGAATYGTRRYYYYWGQGTQVTVSS

SEQ ID NO: 39447 - protein, 118 aa, Artificial Sequence
  Chemically Synthesized
QVQLQESGGGLVQAGGSLRLSCAASGYISQLFAMGWYRQAPGKERELVAAISLGSTTNYADSVKGRFTISRDNAKNTVYLQMNSLKPEDTAVYYCAVGEWDWWYLLYWGQGTQVTVSS

SEQ ID NO: 39448 - protein, 126 aa, Artificial Sequence
  Chemically Synthesized
QVQLQESGGGLVQAGGSLRLSCAASGNIFGTYVMGWYRQAPGKEREFVAAIADGGNTNYADSVKGRFTISRDNAKNTVYLQMNSLKPEDTAVYYCAVLVHSRINDGRPNAPYFYYWGQGTQVTVSS

SEQ ID NO: 39449 - protein, 126 aa, Artificial Sequence
  Chemically Synthesized
QVQLQESGGGLVQAGGSLRLSCAASGNISSRWRMGWYRQAPGKEREFVAGIAHGANTYYADSVKGRFTISRDNAKNTVYLQMNSLKPEDTAVYYCAALLYGDVYGQRGRWAKHYYWGQGTQVTVSS

SEQ ID NO: 39450 - protein, 109 aa, Artificial Sequence
  Chemically Synthesized
QVQLQESGGGLVQAGGSLRLSCAASGTIFLLHYMGWYRQAPGKERETTNYADSVKGRFTISRDNAKNTVYLQMNSLKPEDTAVYYCAAFRHVDRYHYYWGQGTQVTVSS

SEQ ID NO: 39451 - protein, 122 aa, Artificial Sequence
  Chemically Synthesized
QVQLQESGGGLVQAGGSLRLSCAASGNIFYAIIMGWYRQAPGKEREFVAGIGSGGSTNYADSVKGRFTISRDNAKNTVYLQMNSLKPEDTAVYYCAALRYSDTDGGHYHPYWGQGTQVTVSS

SEQ ID NO: 39452 - protein, 118 aa, Artificial Sequence
  Chemically Synthesized
QVQLQESGGGLVQAGGSLRLSCAASGSIFDAAVMGWYRQAPGKEREFVASISQGGSTNYADSVKGRFTISRDNAKNTVYLQMNSLKPEDTAVYYCAALIVSVQYLWYWGQGTQVTVSS

SEQ ID NO: 39453 - protein, 112 aa, Artificial Sequence
  Chemically Synthesized
QVQLQESGGGLVQAGGSLRLSCAASGSISYPYPMGWYRQAPGKERELVAGIDSGSNTNYADSVKGRFTISRDNAKNTVYLQMNSLKPEDTAVYYCAVLRNYWGQGTQVTVSS

SEQ ID NO: 39454 - protein, 125 aa, Artificial Sequence
  Chemically Synthesized
QVQLQESGGGLVQAGGSLRLSCAASGTISTDESMGWYRQAPGKEREFVATIDSGATPYADSVKGRFTISRDNAKNTVYLQMNSLKPEDTAVYYCAARSTGRPNFAWDYYGGHAYWGQGTQVTVSS

SEQ ID NO: 39455 - protein, 118 aa, Artificial Sequence
  Chemically Synthesized
QVQLQESGGGLVQAGGSLRLSCAASGYISPPYYMGWYRQAPGKEREFVAGIDGGSTTNYADSVKGRFTISRDNAKNTVYLQMNSLKPEDTAVYYCAVLSGNGPWLWYWGQGTQVTVSS

SEQ ID NO: 39456 - protein, 121 aa, Artificial Sequence
  Chemically Synthesized
QVQLQESGGGLVQAGGSLRLSCAASGSISVNSYMGWYRQAPGKERELVAGITSGAITNYADSVKGRFTISRDNAKNTVYLQMNSLKPEDTAVYYCAATLCTLGTTLGNMYWGQGTQVTVSS

SEQ ID NO: 39457 - protein, 117 aa, Artificial Sequence
  Chemically Synthesized
QVQLQESGGGLVQAGGSLRLSCAASGNISLPVMGWYRQAPGKERELVASIAYGSSTNYADSVKGRFTISRDNAKNTVYLQMNSLKPEDTAVYYCAAYDLAAYDYAYWGQGTQVTVSS

SEQ ID NO: 39458 - protein, 118 aa, Artificial Sequence
  Chemically Synthesized
QVQLQESGGGLVQAGGSLRLSCAASGTISVDSGMGWYRQAPGKEREFVAGIDPGANTYYADSVKGRFTISRDNAKNTVYLQMNSLKPEDTAVYYCAAISLRVDVHYYWGQGTQVTVSS

SEQ ID NO: 39459 - protein, 110 aa, Artificial Sequence
  Chemically Synthesized
QVQLQESGGGLVQAGGSLRLSCAASGTISSPVNMGWYRQAPGKEREFVATISKGGNTNYADSVKGRFTISRDNAKNTVYLQMNSLKPEDTAVYYCATMYWGQGTQVTVSS

SEQ ID NO: 39460 - protein, 117 aa, Artificial Sequence
  Chemically Synthesized
QVQLQESGGGLVQAGGSLRLSCAASGTISRRATMGWYRQAPGKEREFVAAIVRVVLPYADSVKGRFTISRDNAKNTVYLQMNSLKPEDTAVYYCAVGAYDYYGLAYWGQGTQVTVSS

SEQ ID NO: 39461 - protein, 122 aa, Artificial Sequence
  Chemically Synthesized
QVQLQESGGGLVQAGGSLRLSCAASGTIFRYQGMGWYRQAPGKERELVASIARGAITYYADSVKGRFTISRDNAKNTVYLQMNSLKPEDTAVYYCAVDRHRHWAYPGRLRYWGQGTQVTVSS

SEQ ID NO: 39462 - protein, 117 aa, Artificial Sequence
  Chemically Synthesized
QVQLQESGGGLVQAGGSLRLSCAASGNIFYYGMGWYRQAPGKERELVAGISFGASTYYADSVKGRFTISRDNAKNTVYLQMNSLKPEDTAVYYCAVLVDALHAHSYWGQGTQVTVSS

SEQ ID NO: 39463 - protein, 120 aa, Artificial Sequence
  Chemically Synthesized
QVQLQESGGGLVQAGGSLRLSCAASGYSSADQMGWYRQAPGKEREFVASISTGSSTNYADSVKGRFTISRDNAKNTVYLQMNSLKPEDTAVYYCAAVVLSHYYAGYPMYWGQGTQVTVSS

SEQ ID NO: 39464 - protein, 109 aa, Artificial Sequence
  Chemically Synthesized
QVQLQESGGGLVQAGGSLRLSCAASGYISPGYYMGWYRQAPGKERELVASISAGASTNYADSVKGRFTISRDNAKNTVYLQMNSLKPEDTAVYYCAVYWGQGTQVTVSS

SEQ ID NO: 39465 - protein, 125 aa, Artificial Sequence
  Chemically Synthesized
QVQLQESGGGLVQAGGSLRLSCAASGNIFAYSMGWYRQAPGKEREFVAGISWGSTTYYADSVKGRFTISRDNAKNTVYLQMNSLKPEDTAVYYCAAGIAIGYVQPSMLVYFYSYWGQGTQVTVSS

SEQ ID NO: 39466 - protein, 117 aa, Artificial Sequence
  Chemically Synthesized
QVQLQESGGGLVQAGGSLRLSCAASGYISPPYAMGWYRQAPGKEREFVAGINYGATTNYADSVKGRFTISRDNAKNTVYLQMNSLKPEDTAVYYCAVLYSPYPHYYWGQGTQVTVSS

SEQ ID NO: 39467 - protein, 122 aa, Artificial Sequence
  Chemically Synthesized
QVQLQESGGGLVQAGGSLRLSCAASGSISSAIFMGWYRQAPGKEREFVAAIDRGGSTYYADSVKGRFTISRDNAKNTVYLQMNSLKPEDTAVYYCAAGYSYLQAGSPVHQYWGQGTQVTVSS

SEQ ID NO: 39468 - protein, 125 aa, Artificial Sequence
  Chemically Synthesized
QVQLQESGGGLVQAGGSLRLSCAASGTISFWDTMGWYRQAPGKERELVAAIGRGGNTYYADSVKGRFTISRDNAKNTVYLQMNSLKPEDTAVYYCAVGGDQTIPRSDAQGSSLYWGQGTQVTVSS

SEQ ID NO: 39469 - protein, 113 aa, Artificial Sequence
  Chemically Synthesized
QVQLQESGGGLVQAGGSLRLSCAASGTIMGWYRQAPGKERELVAAISDGGNTNYADSVKGRFTISRDNAKNTVYLQMNSLKPEDTAVYYCAAEGDNQSFLKYWGQGTQVTVSS

SEQ ID NO: 39470 - protein, 122 aa, Artificial Sequence
  Chemically Synthesized
QVQLQESGGGLVQAGGSLRLSCAASGSIFSSAYMGWYRQAPGKEREFVASINFGGTTNYADSVKGRFTISRDNAKNTVYLQMNSLKPEDTAVYYCAAVPPWYERWDLYHLYWGQGTQVTVSS

SEQ ID NO: 39471 - protein, 118 aa, Artificial Sequence
  Chemically Synthesized
QVQLQESGGGLVQAGGSLRLSCAASGNISRRLAMGWYRQAPGKEREFVAGIDWGTTTNYADSVKGRFTISRDNAKNTVYLQMNSLKPEDTAVYYCAAINITRYYHGYWGQGTQVTVSS

SEQ ID NO: 39472 - protein, 118 aa, Artificial Sequence
  Chemically Synthesized
QVQLQESGGGLVQAGGSLRLSCAASGSISFLIAMGWYRQAPGKERELVAGIGRGANTNYADSVKGRFTISRDNAKNTVYLQMNSLKPEDTAVYYCAAISRDVVWHYYWGQGTQVTVSS

SEQ ID NO: 39473 - protein, 122 aa, Artificial Sequence
  Chemically Synthesized
QVQLQESGGGLVQAGGSLRLSCAASGNISGESYMGWYRQAPGKEREFVAGITYGSITYYADSVKGRFTISRDNAKNTVYLQMNSLKPEDTAVYYCAALLQWYAHPQAYFAYWGQGTQVTVSS

SEQ ID NO: 39474 - protein, 122 aa, Artificial Sequence
  Chemically Synthesized
QVQLQESGGGLVQAGGSLRLSCAASGNISPFYFMGWYRQAPGKERELVASISTGASTNYADSVKGRFTISRDNAKNTVYLQMNSLKPEDTAVYYCAAYTDYVTRGYRNHSYWGQGTQVTVSS

SEQ ID NO: 39475 - protein, 126 aa, Artificial Sequence
  Chemically Synthesized
QVQLQESGGGLVQAGGSLRLSCAASGNISGVGSMGWYRQAPGKERELVASINHGGNTNYADSVKGRFTISRDNAKNTVYLQMNSLKPEDTAVYYCAAPYETSRYDGDTSDHGHDYWGQGTQVTVSS

SEQ ID NO: 39476 - protein, 122 aa, Artificial Sequence
  Chemically Synthesized
QVQLQESGGGLVQAGGSLRLSCAASGSISYVFYMGWYRQAPGKERELVAAISAGTTTNYADSVKGRFTISRDNAKNTVYLQMNSLKPEDTAVYYCAAWYDPDGHDYTDHYYWGQGTQVTVSS

SEQ ID NO: 39477 - protein, 118 aa, Artificial Sequence
  Chemically Synthesized
QVQLQESGGGLVQAGGSLRLSCAASGSISPYPSMGWYRQAPGKEREFVAAIDQGGNTYYADSVKGRFTISRDNAKNTVYLQMNSLKPEDTAVYYCAVYQDPQRWHGYWGQGTQVTVSS

SEQ ID NO: 39478 - protein, 117 aa, Artificial Sequence
  Chemically Synthesized
QVQLQESGGGLVQAGGSLRLSCAASGSIFSYAMGWYRQAPGKERELVATITTGGITYYADSVKGRFTISRDNAKNTVYLQMNSLKPEDTAVYYCAAEESWGWVYQYWGQGTQVTVSS

SEQ ID NO: 39479 - protein, 124 aa, Artificial Sequence
  Chemically Synthesized
QVQLQESGGGLVQAGGSLRLSCAASGTISAPYAMGWYRQAPGKEREFVATIASGTTNYADSVKGRFTISRDNAKNTVYLQMNSLKPEDTAVYYCAVGDVADRVDESGNSLFIYWGQGTQVTVSS

SEQ ID NO: 39480 - protein, 125 aa, Artificial Sequence
  Chemically Synthesized
QVQLQESGGGLVQAGGSLRLSCAASGNIFIYYSMGWYRQAPGKERELVAAISKGASTNYADSVKGRFTISRDNAKNTVYLQMNSLKPEDTAVYYCAAVEGYYVYAWDNVTSPFYWGQGTQVTVSS

SEQ ID NO: 39481 - protein, 117 aa, Artificial Sequence
  Chemically Synthesized
QVQLQESGGGLVQAGGSLRLSCAASGNISVPNNMGWYRQAPGKERELVASINLYADSVKGRFTISRDNAKNTVYLQMNSLKPEDTAVYYCAVGSDFAIQPKQGHQYWGQGTQVTVSS

SEQ ID NO: 39482 - protein, 126 aa, Artificial Sequence
  Chemically Synthesized
QVQLQESGGGLVQAGGSLRLSCAASGYISGWSYMGWYRQAPGKEREFVATITTGTSTNYADSVKGRFTISRDNAKNTVYLQMNSLKPEDTAVYYCAASRRNRRWYYGYGPVSYYYWGQGTQVTVSS

SEQ ID NO: 39483 - protein, 118 aa, Artificial Sequence
  Chemically Synthesized
QVQLQESGGGLVQAGGSLRLSCAASGYIFGSINMGWYRQAPGKEREFVATISLGATTYYADSVKGRFTISRDNAKNTVYLQMNSLKPEDTAVYYCAAPFFSGLPVCYWGQGTQVTVSS

SEQ ID NO: 39484 - protein, 117 aa, Artificial Sequence
  Chemically Synthesized
QVQLQESGGGLVQAGGSLRLSCAASGTISRDSYMGWYRQAPGKEREFVASITDGGIPYADSVKGRFTISRDNAKNTVYLQMNSLKPEDTAVYYCAASYAYPIGYIYWGQGTQVTVSS

SEQ ID NO: 39485 - protein, 118 aa, Artificial Sequence
  Chemically Synthesized
QVQLQESGGGLVQAGGSLRLSCAASGTIFPDDGMGWYRQAPGKERELVATINLGASTYYADSVKGRFTISRDNAKNTVYLQMNSLKPEDTAVYYCAVWDATGVYLVYWGQGTQVTVSS

SEQ ID NO: 39486 - protein, 118 aa, Artificial Sequence
  Chemically Synthesized
QVQLQESGGGLVQAGGSLRLSCAASGTISTTVYMGWYRQAPGKEREFVAGINFGSSTYYADSVKGRFTISRDNAKNTVYLQMNSLKPEDTAVYYCAAYYYIRYWFSYWGQGTQVTVSS

SEQ ID NO: 39487 - protein, 126 aa, Artificial Sequence
  Chemically Synthesized
QVQLQESGGGLVQAGGSLRLSCAASGNISSYYRMGWYRQAPGKEREFVATIAGGAITYYADSVKGRFTISRDNAKNTVYLQMNSLKPEDTAVYYCAATKHVIDPLGYQVGYSYSYWGQGTQVTVSS

SEQ ID NO: 39488 - protein, 126 aa, Artificial Sequence
  Chemically Synthesized
QVQLQESGGGLVQAGGSLRLSCAASGTIFSRITMGWYRQAPGKEREFVAAINPGATTYYADSVKGRFTISRDNAKNTVYLQMNSLKPEDTAVYYCAVQYGYAGVGYSCYPAGLYYWGQGTQVTVSS

SEQ ID NO: 39489 - protein, 122 aa, Artificial Sequence
  Chemically Synthesized
QVQLQESGGGLVQAGGSLRLSCAASGTIFTRSGMGWYRQAPGKEREFVASIDTGTNTNYADSVKGRFTISRDNAKNTVYLQMNSLKPEDTAVYYCAAIRGGLQEYLYYYPYWGQGTQVTVSS

SEQ ID NO: 39490 - protein, 118 aa, Artificial Sequence
  Chemically Synthesized
QVQLQESGGGLVQAGGSLRLSCAASGNISYVYGMGWYRQAPGKERELVAGIAWGGNTYYADSVKGRFTISRDNAKNTVYLQMNSLKPEDTAVYYCAAYSAYDPAHSYWGQGTQVTVSS

SEQ ID NO: 39491 - protein, 125 aa, Artificial Sequence
  Chemically Synthesized
QVQLQESGGGLVQAGGSLRLSCAASGNIFGALAMGWYRQAPGKEREFVAGIGDGAITYYADSVKGRFTISRDNAKNTVYLQMNSLKPEDTAVYYCAVPTYDGRDVASVTLVVIYWGQGTQVTVSS

SEQ ID NO: 39492 - protein, 118 aa, Artificial Sequence
  Chemically Synthesized
QVQLQESGGGLVQAGGSLRLSCAASGYISYFSTMGWYRQAPGKERELVAGIGIGGITYYADSVKGRFTISRDNAKNTVYLQMNSLKPEDTAVYYCAVSYWGPADHIYWGQGTQVTVSS

SEQ ID NO: 39493 - protein, 122 aa, Artificial Sequence
  Chemically Synthesized
QVQLQESGGGLVQAGGSLRLSCAASGTISGYDYMGWYRQAPGKERELVASISTGGTTYYADSVKGRFTISRDNAKNTVYLQMNSLKPEDTAVYYCAAVTHYWAGYSYTFAYWGQGTQVTVSS

SEQ ID NO: 39494 - protein, 116 aa, Artificial Sequence
  Chemically Synthesized
QVQLQESGGGLVQAGGSLRLSCAASGTIFIAMGWYRQAPGKERELVASIDWGASTYYADSVKGRFTISRDNAKNTVYLQMNSLKPEDTAVYYCAALGYYSQDHPYWGQGTQVTVSS

SEQ ID NO: 39495 - protein, 122 aa, Artificial Sequence
  Chemically Synthesized
QVQLQESGGGLVQAGGSLRLSCAASGTISVSSDMGWYRQAPGKERELVATITLGGITNYADSVKGRFTISRDNAKNTVYLQMNSLKPEDTAVYYCAVAEDRGRRLVDYLFYWGQGTQVTVSS

SEQ ID NO: 39496 - protein, 117 aa, Artificial Sequence
  Chemically Synthesized
QVQLQESGGGLVQAGGSLRLSCAASGNISGSNDMGWYRQAPGKERELVASIAVGTTTNYADSVKGRFTISRDNAKNTVYLQMNSLKPEDTAVYYCAARYVSTSGIYWGQGTQVTVSS

SEQ ID NO: 39497 - protein, 126 aa, Artificial Sequence
  Chemically Synthesized
QVQLQESGGGLVQAGGSLRLSCAASGYIFYIYYMGWYRQAPGKEREFVAGISRGSITNYADSVKGRFTISRDNAKNTVYLQMNSLKPEDTAVYYCAVYVQGYNRRGYGQGQYFTYWGQGTQVTVSS

SEQ ID NO: 39498 - protein, 118 aa, Artificial Sequence
  Chemically Synthesized
QVQLQESGGGLVQAGGSLRLSCAASGYIFATNYMGWYRQAPGKERELVAAIARGANTNYADSVKGRFTISRDNAKNTVYLQMNSLKPEDTAVYYCAVFVLILAFLGYWGQGTQVTVSS

SEQ ID NO: 39499 - protein, 118 aa, Artificial Sequence
  Chemically Synthesized
QVQLQESGGGLVQAGGSLRLSCAASGNIFGRTPMGWYRQAPGKERELVASISYGGNTNYADSVKGRFTISRDNAKNTVYLQMNSLKPEDTAVYYCAVRRYRYAYFSYWGQGTQVTVSS

SEQ ID NO: 39500 - protein, 121 aa, Artificial Sequence
  Chemically Synthesized
QVQLQESGGGLVQAGGSLRLSCAASGSIFYYRYMGWYRQAPGKERELVATIGVGSSTYYADSVKGRFTISRDNAKNTVYLQMNSLKPEDTAVYYCAAPSPSWYYDRPDHYWGQGTQVTVSS

SEQ ID NO: 39501 - protein, 117 aa, Artificial Sequence
  Chemically Synthesized
QVQLQESGGGLVQAGGSLRLSCAASGSISLVTVMGWYRQAPGKEREFVATINMVVIPYADSVKGRFTISRDNAKNTVYLQMNSLKPEDTAVYYCAAREAYGYRYGYWGQGTQVTVSS

SEQ ID NO: 39502 - protein, 120 aa, Artificial Sequence
  Chemically Synthesized
QVQLQESGGGLVQAGGSLRLSCAASGYISGSQMGWYRQAPGKERELVAAIAGGGNTNYADSVKGRFTISRDNAKNTVYLQMNSLKPEDTAVYYCAAPWSSTSSVTTVIYWGQGTQVTVSS

SEQ ID NO: 39503 - protein, 118 aa, Artificial Sequence
  Chemically Synthesized
QVQLQESGGGLVQAGGSLRLSCAASGNIFLPDNMGWYRQAPGKEREFVATIAKGTNTYYADSVKGRFTISRDNAKNTVYLQMNSLKPEDTAVYYCAVPSPYLLSALYWGQGTQVTVSS

SEQ ID NO: 39504 - protein, 118 aa, Artificial Sequence
  Chemically Synthesized
QVQLQESGGGLVQAGGSLRLSCAASGYIFWVYRMGWYRQAPGKEREFVAGIAEGGSTYYADSVKGRFTISRDNAKNTVYLQMNSLKPEDTAVYYCAAAPTYGDSYFYWGQGTQVTVSS

SEQ ID NO: 39505 - protein, 118 aa, Artificial Sequence
  Chemically Synthesized
QVQLQESGGGLVQAGGSLRLSCAASGSISPWDTMGWYRQAPGKERELVATIGGGTNTYYADSVKGRFTISRDNAKNTVYLQMNSLKPEDTAVYYCAVRYADTDDLPYWGQGTQVTVSS

SEQ ID NO: 39506 - protein, 122 aa, Artificial Sequence
  Chemically Synthesized
QVQLQESGGGLVQAGGSLRLSCAASGNIFDATYMGWYRQAPGKERELVAAIDDGGITNYADSVKGRFTISRDNAKNTVYLQMNSLKPEDTAVYYCAVIAGPSVQDDNLYRYWGQGTQVTVSS

SEQ ID NO: 39507 - protein, 127 aa, Artificial Sequence
  Chemically Synthesized
QVQLQESGGGLVQAGGSLRLSCAASGNISQLDGMGWYRQAPGKEREFVAAITDGGITYYADSVKGRFTISRDNAKNTVYLQMNSLKPEDTAVYYCAVWGGASWYDYAGASIYPLGYWGQGTQVTVSS

SEQ ID NO: 39508 - protein, 117 aa, Artificial Sequence
  Chemically Synthesized
QVQLQESGGGLVQAGGSLRLSCAASGYISESQYMGWYRQAPGKERELVAGISPGGTTYYADSVKGRFTISRDNAKNTVYLQMNSLKPEDTAVYYCAALDASVTVMYWGQGTQVTVSS

SEQ ID NO: 39509 - protein, 117 aa, Artificial Sequence
  Chemically Synthesized
QVQLQESGGGLVQAGGSLRLSCAASGYIFTLWMGWYRQAPGKERELVATIATGGNTYYADSVKGRFTISRDNAKNTVYLQMNSLKPEDTAVYYCAARPSEYRRYAYWGQGTQVTVSS

SEQ ID NO: 39510 - protein, 116 aa, Artificial Sequence
  Chemically Synthesized
QVQLQESGGGLVQAGGSLRLSCAASGSISYYNMGWYRQAPGKERELVATIIPYADSVKGRFTISRDNAKNTVYLQMNSLKPEDTAVYYCAADDAAYYLFVRLSFYWGQGTQVTVSS

SEQ ID NO: 39511 - protein, 118 aa, Artificial Sequence
  Chemically Synthesized
QVQLQESGGGLVQAGGSLRLSCAASGSISVRYYMGWYRQAPGKEREFVASIDQGAITYYADSVKGRFTISRDNAKNTVYLQMNSLKPEDTAVYYCAVVRRRYGRYLYWGQGTQVTVSS

SEQ ID NO: 39512 - protein, 118 aa, Artificial Sequence
  Chemically Synthesized
QVQLQESGGGLVQAGGSLRLSCAASGNIFGKRYMGWYRQAPGKEREFVATITFGGSTYYADSVKGRFTISRDNAKNTVYLQMNSLKPEDTAVYYCAVDYYPTRDFDYWGQGTQVTVSS

SEQ ID NO: 39513 - protein, 122 aa, Artificial Sequence
  Chemically Synthesized
QVQLQESGGGLVQAGGSLRLSCAASGTIFYVGTMGWYRQAPGKERELVASISPGASTYYADSVKGRFTISRDNAKNTVYLQMNSLKPEDTAVYYCAVPRPFHDGDTKRLTYWGQGTQVTVSS

SEQ ID NO: 39514 - protein, 122 aa, Artificial Sequence
  Chemically Synthesized
QVQLQESGGGLVQAGGSLRLSCAASGTISWRRVMGWYRQAPGKEREFVAGISYGTNTYYADSVKGRFTISRDNAKNTVYLQMNSLKPEDTAVYYCAAYKRRRADAYDNHQYWGQGTQVTVSS

SEQ ID NO: 39515 - protein, 122 aa, Artificial Sequence
  Chemically Synthesized
QVQLQESGGGLVQAGGSLRLSCAASGSISLVAYMGWYRQAPGKERELVATIADGATTYYADSVKGRFTISRDNAKNTVYLQMNSLKPEDTAVYYCAAIDRYWYSLDKWLYYWGQGTQVTVSS

SEQ ID NO: 39516 - protein, 119 aa, Artificial Sequence
  Chemically Synthesized
QVQLQESGGGLVQAGGSLRLSCAASGTISYWFAMGWYRQAPGKEREFVAAINYGTNTNYADSVKGRFTISRDNAKNTVYLQMNSLKPEDTAVYYCAVYVPYSTLTNLYWGQGTQVTVSS

SEQ ID NO: 39517 - protein, 122 aa, Artificial Sequence
  Chemically Synthesized
QVQLQESGGGLVQAGGSLRLSCAASGYIFPLYLMGWYRQAPGKERELVAAIGWGGTTYYADSVKGRFTISRDNAKNTVYLQMNSLKPEDTAVYYCAVRRTPRGQPARGLGYWGQGTQVTVSS

SEQ ID NO: 39518 - protein, 118 aa, Artificial Sequence
  Chemically Synthesized
QVQLQESGGGLVQAGGSLRLSCAASGNISRFVGMGWYRQAPGKEREFVASIGYGANTNYADSVKGRFTISRDNAKNTVYLQMNSLKPEDTAVYYCAVYYRDFTFLSYWGQGTQVTVSS

SEQ ID NO: 39519 - protein, 117 aa, Artificial Sequence
  Chemically Synthesized
QVQLQESGGGLVQAGGSLRLSCAASGYILWTSMGWYRQAPGKEREFVASIDSGTTTNYADSVKGRFTISRDNAKNTVYLQMNSLKPEDTAVYYCAVYGVFLPLHDYWGQGTQVTVSS

SEQ ID NO: 39520 - protein, 117 aa, Artificial Sequence
  Chemically Synthesized
QVQLQESGGGLVQAGGSLRLSCAASGYISSSYSMGWYRQAPGKEREFVAGIGKGGNTNYADSVKGRFTISRDNAKNTVYLQMNSLKPEDTAVYYCAADRSYSTTFYWGQGTQVTVSS

SEQ ID NO: 39521 - protein, 118 aa, Artificial Sequence
  Chemically Synthesized
QVQLQESGGGLVQAGGSLRLSCAASGTIFPALVMGWYRQAPGKERELVPVLVSVLVPNYADSVKGRFTISRDNAKNTVYLQMNSLKPEDTAVYYCAAIDLDGPAYWYWGQGTQVTVSS

SEQ ID NO: 39522 - protein, 118 aa, Artificial Sequence
  Chemically Synthesized
QVQLQESGGGLVQAGGSLRLSCAASGTIFDVYQMGWYRQAPGKERELVATISYGSTTYYADSVKGRFTISRDNAKNTVYLQMNSLKPEDTAVYYCAARGQLSDDFGYWGQGTQVTVSS

SEQ ID NO: 39523 - protein, 118 aa, Artificial Sequence
  Chemically Synthesized
QVQLQESGGGLVQAGGSLRLSCAASGSISHWASMGWYRQAPGKEREFVATITAGGSTYYADSVKGRFTISRDNAKNTVYLQMNSLKPEDTAVYYCAAARQVGTDYHYWGQGTQVTVSS

SEQ ID NO: 39524 - protein, 122 aa, Artificial Sequence
  Chemically Synthesized
QVQLQESGGGLVQAGGSLRLSCAASGNISSDYHMGWYRQAPGKEREFVASIDPGTNTNYADSVKGRFTISRDNAKNTVYLQMNSLKPEDTAVYYCAAYVDSPRYPANHHRYWGQGTQVTVSS

SEQ ID NO: 39525 - protein, 118 aa, Artificial Sequence
  Chemically Synthesized
QVQLQESGGGLVQAGGSLRLSCAASGYIFPDSGMGWYRQAPGKERELVAGITTGSNTNYADSVKGRFTISRDNAKNTVYLQMNSLKPEDTAVYYCAAIELYTDGHYYWGQGTQVTVSS

SEQ ID NO: 39526 - protein, 124 aa, Artificial Sequence
  Chemically Synthesized
QVQLQESGGGLVQAGGSLRLSCAASGNISYKDYMGWYRQAPGKERELVATINYGGTTYYADSVKGRFTISRDNAKNTVYLQMNSLKPEDTAVYYCATAWNNWDWQSVRLHFCYWGQGTQVTVSS

SEQ ID NO: 39527 - protein, 118 aa, Artificial Sequence
  Chemically Synthesized
QVQLQESGGGLVQAGGSLRLSCAASGNIFLPYVMGWYRQAPGKERELVAGIGFGTTTYYADSVKGRFTISRDNAKNTVYLQMNSLKPEDTAVYYCAARIPFGDAHTYWGQGTQVTVSS

SEQ ID NO: 39528 - protein, 126 aa, Artificial Sequence
  Chemically Synthesized
QVQLQESGGGLVQAGGSLRLSCAASGYISYADFMGWYRQAPGKEREFVAAIAAGTNTNYADSVKGRFTISRDNAKNTVYLQMNSLKPEDTAVYYCAARDKPWGHYRDLYEDRHEYWGQGTQVTVSS

SEQ ID NO: 39529 - protein, 121 aa, Artificial Sequence
  Chemically Synthesized
QVQLQESGGGLVQAGGSLRLSCAASGTILTLVMGWYRQAPGKERELVATITTGASTNYADSVKGRFTISRDNAKNTVYLQMNSLKPEDTAVYYCAADVYLVYYVSFIHQYWGQGTQVTVSS

SEQ ID NO: 39530 - protein, 120 aa, Artificial Sequence
  Chemically Synthesized
QVQLQESGGGLVQAGGSLRLSCAASGSIFPPADMGWYRQAPGKERELVAGIDVGSSTNYADSVKGRFTISRDNAKNTVYLQMNSLKPEDTAVYYCAAVLLLPVLPGLFYWGQGTQVTVSS

SEQ ID NO: 39531 - protein, 119 aa, Artificial Sequence
  Chemically Synthesized
QVQLQESGGGLVQAGGSLRLSCAASGYIFWTRYMGWYRQAPGKERELVAAIAYGGSTYYADSVKGRFTISRDNAKNTVYLQMNSLKPEDTAVYYCAVSRRRGDRYLLYWGQGTQVTVSS

SEQ ID NO: 39532 - protein, 126 aa, Artificial Sequence
  Chemically Synthesized
QVQLQESGGGLVQAGGSLRLSCAASGSISSHYRMGWYRQAPGKERELVAGIDPGGITYYADSVKGRFTISRDNAKNTVYLQMNSLKPEDTAVYYCAATVYQPLPYRRSDQWWYDYWGQGTQVTVSS

SEQ ID NO: 39533 - protein, 118 aa, Artificial Sequence
  Chemically Synthesized
QVQLQESGGGLVQAGGSLRLSCAASGYISRTVQMGWYRQAPGKEREFVASIGRGGTTNYADSVKGRFTISRDNAKNTVYLQMNSLKPEDTAVYYCAVDDTYDLYHIYWGQGTQVTVSS

SEQ ID NO: 39534 - protein, 118 aa, Artificial Sequence
  Chemically Synthesized
QVQLQESGGGLVQAGGSLRLSCAASGTISRGDTMGWYRQAPGKEREFVATISPGSSTYYADSVKGRFTISRDNAKNTVYLQMNSLKPEDTAVYYCAAYGPDHGALWYWGQGTQVTVSS

SEQ ID NO: 39535 - protein, 128 aa, Artificial Sequence
  Chemically Synthesized
QVQLQESGGGLVQAGGSLRLSCAASGTISAPENMGWYRQAPGKEREFVAGITGGSSTYYADSVKGRFTISRDNAKNTVYLQMNSLKPEDTAVYYCAAHELPDYWDVYTLSDGDEHGYWGQGTQVTVSS

SEQ ID NO: 39536 - protein, 121 aa, Artificial Sequence
  Chemically Synthesized
QVQLQESGGGLVQAGGSLRLSCAASGLFLTSRMGWYRQAPGKERELVATITRGSTTNYADSVKGRFTISRDNAKNTVYLQMNSLKPEDTAVYYCAATRDNLQYRIYRFIYWGQGTQVTVSS

SEQ ID NO: 39537 - protein, 118 aa, Artificial Sequence
  Chemically Synthesized
QVQLQESGGGLVQAGGSLRLSCAASGNISGYWWMGWYRQAPGKERELVASIDYGGNTYYADSVKGRFTISRDNAKNTVYLQMNSLKPEDTAVYYCAVTDQAWYVHRYWGQGTQVTVSS

SEQ ID NO: 39538 - protein, 126 aa, Artificial Sequence
  Chemically Synthesized
QVQLQESGGGLVQAGGSLRLSCAASGNIFGSNDMGWYRQAPGKERELVAGIGTGGNTYYADSVKGRFTISRDNAKNTVYLQMNSLKPEDTAVYYCAVLRRIFTLYLYLRRADLLYWGQGTQVTVSS

SEQ ID NO: 39539 - protein, 118 aa, Artificial Sequence
  Chemically Synthesized
QVQLQESGGGLVQAGGSLRLSCAASGSISRRTYMGWYRQAPGKEREFVAAIAGGATTNYADSVKGRFTISRDNAKNTVYLQMNSLKPEDTAVYYCAVHWYRSGWLRYWGQGTQVTVSS

SEQ ID NO: 39540 - protein, 116 aa, Artificial Sequence
  Chemically Synthesized
QVQLQESGGGLVQAGGSLRLSCAASGYISSRGYMGWYRQAPGKERELVAGIAGGGTTYYADSVKGRFTISRDNAKNTVYLQMNSLKPEDTAVYYCAVVKPDDDSYWGQGTQVTVSS

SEQ ID NO: 39541 - protein, 118 aa, Artificial Sequence
  Chemically Synthesized
QVQLQESGGGLVQAGGSLRLSCAASGNISDAGNMGWYRQAPGKERELVAAIGNGTTTYYADSVKGRFTISRDNAKNTVYLQMNSLKPEDTAVYYCAVFYYYPFDYLYWGQGTQVTVSS

SEQ ID NO: 39542 - protein, 126 aa, Artificial Sequence
  Chemically Synthesized
QVQLQESGGGLVQAGGSLRLSCAASGSISQHSYMGWYRQAPGKERELVATIDNGGITNYADSVKGRFTISRDNAKNTVYLQMNSLKPEDTAVYYCAALRTVDQGDPRYTAYYLDYWGQGTQVTVSS

SEQ ID NO: 39543 - protein, 110 aa, Artificial Sequence
  Chemically Synthesized
QVQLQESGGGLVQAGGSLRLSCAASGTIFDDFMGWYRQAPGKEREFVAAIDSGTITYYADSVKGRFTISRDNAKNTVYLQMNSLKPEDTAVYYCATSFYWGQGTQVTVSS

SEQ ID NO: 39544 - protein, 118 aa, Artificial Sequence
  Chemically Synthesized
QVQLQESGGGLVQAGGSLRLSCAASGNIFGYPSMGWYRQAPGKERELVATIDRGGSTNYADSVKGRFTISRDNAKNTVYLQMNSLKPEDTAVYYCAAARYKGVSFTYWGQGTQVTVSS

SEQ ID NO: 39545 - protein, 118 aa, Artificial Sequence
  Chemically Synthesized
QVQLQESGGGLVQAGGSLRLSCAASGSIFQTDYMGWYRQAPGKEREFVASIAVGATTNYADSVKGRFTISRDNAKNTVYLQMNSLKPEDTAVYYCAADSGKRDEHGYWGQGTQVTVSS

SEQ ID NO: 39546 - protein, 117 aa, Artificial Sequence
  Chemically Synthesized
QVQLQESGGGLVQAGGSLRLSCAASGNIFFGTLMGWYRQAPGKEREFVATINYGANPYADSVKGRFTISRDNAKNTVYLQMNSLKPEDTAVYYCAAYAYRYPNLDYWGQGTQVTVSS

SEQ ID NO: 39547 - protein, 122 aa, Artificial Sequence
  Chemically Synthesized
QVQLQESGGGLVQAGGSLRLSCAASGTISGNTSMGWYRQAPGKERELVAAISYGTTTNYADSVKGRFTISRDNAKNTVYLQMNSLKPEDTAVYYCAADDDNSWSGRPFLDYWGQGTQVTVSS

SEQ ID NO: 39548 - protein, 118 aa, Artificial Sequence
  Chemically Synthesized
QVQLQESGGGLVQAGGSLRLSCAASGTISYRLHMGWYRQAPGKERELVAGIARGTNTYYADSVKGRFTISRDNAKNTVYLQMNSLKPEDTAVYYCAAKVQSLDRFAYWGQGTQVTVSS

SEQ ID NO: 39549 - protein, 118 aa, Artificial Sequence
  Chemically Synthesized
QVQLQESGGGLVQAGGSLRLSCAASGTISSFTYMGWYRQAPGKERELVASITHGTITYYADSVKGRFTISRDNAKNTVYLQMNSLKPEDTAVYYCAVGRYPWRQHDYWGQGTQVTVSS

SEQ ID NO: 39550 - protein, 126 aa, Artificial Sequence
  Chemically Synthesized
QVQLQESGGGLVQAGGSLRLSCAASGYIFTDYIMGWYRQAPGKERELVASIAGGGSTNYADSVKGRFTISRDNAKNTVYLQMNSLKPEDTAVYYCAAYATHYTSVRRDTYADYIYWGQGTQVTVSS

SEQ ID NO: 39551 - protein, 126 aa, Artificial Sequence
  Chemically Synthesized
QVQLQESGGGLVQAGGSLRLSCAASGSISGANYMGWYRQAPGKEREFVAAITQGAITYYADSVKGRFTISRDNAKNTVYLQMNSLKPEDTAVYYCAVGKYRYSTVDRTDATSLPYWGQGTQVTVSS

SEQ ID NO: 39552 - protein, 121 aa, Artificial Sequence
  Chemically Synthesized
QVQLQESGGGLVQAGGSLRLSCAASGNISYRINMGWYRQAPGKERELVATIAYGTTTYYADSVKGRFTISRDNAKNTVYLQMNSLKPEDTAVYYCAVARDSSTWVSTVIYWGQGTQVTVSS

SEQ ID NO: 39553 - protein, 118 aa, Artificial Sequence
  Chemically Synthesized
QVQLQESGGGLVQAGGSLRLSCAASGSIFTYYDMGWYRQAPGKEREFVASIADGGITYYADSVKGRFTISRDNAKNTVYLQMNSLKPEDTAVYYCAVPDLYGAYHDYWGQGTQVTVSS

SEQ ID NO: 39554 - protein, 116 aa, Artificial Sequence
  Chemically Synthesized
QVQLQESGGGLVQAGGSLRLSCAASGNISDRLMGWYRQAPGKEREFVAGIDYGGITYYADSVKGRFTISRDNAKNTVYLQMNSLKPEDTAVYYCAAIRADFLHYYWGQGTQVTVSS

SEQ ID NO: 39555 - protein, 109 aa, Artificial Sequence
  Chemically Synthesized
QVQLQESGGGLVQAGGSLRLSCAASGTIFSQIFMGWYRQAPGKEREFVASISDGSSTNYADSVKGRFTISRDNAKNTVYLQMNSLKPEDTAVYYCAIYWGQGTQVTVSS

SEQ ID NO: 39556 - protein, 122 aa, Artificial Sequence
  Chemically Synthesized
QVQLQESGGGLVQAGGSLRLSCAASGTIFDFYDMGWYRQAPGKERELVATIDYGTITYYADSVKGRFTISRDNAKNTVYLQMNSLKPEDTAVYYCAADRYVGATDWYVHRYWGQGTQVTVSS

SEQ ID NO: 39557 - protein, 111 aa, Artificial Sequence
  Chemically Synthesized
QVQLQESGGGLVQAGGSLRLSCAASGTISNYDEMGWYRQAPGKEREFVAVLLLVVPYADSVKGRFTISRDNAKNTVYLQMNSLKPEDTAVYYCAVYLYVYWGQGTQVTVSS

SEQ ID NO: 39558 - protein, 122 aa, Artificial Sequence
  Chemically Synthesized
QVQLQESGGGLVQAGGSLRLSCAASGNISAVVAMGWYRQAPGKERELVAAIGYGASTNYADSVKGRFTISRDNAKNTVYLQMNSLKPEDTAVYYCAVTDKYGNDYFYNHSYWGQGTQVTVSS

SEQ ID NO: 39559 - protein, 118 aa, Artificial Sequence
  Chemically Synthesized
QVQLQESGGGLVQAGGSLRLSCAASGYISRYFAMGWYRQAPGKEREFVAAIADGANTNYADSVKGRFTISRDNAKNTVYLQMNSLKPEDTAVYYCAVDYVGGQSHGYWGQGTQVTVSS

SEQ ID NO: 39560 - protein, 118 aa, Artificial Sequence
  Chemically Synthesized
QVQLQESGGGLVQAGGSLRLSCAASGTIFYPDSMGWYRQAPGKERELVAGISNGSSTNYADSVKGRFTISRDNAKNTVYLQMNSLKPEDTAVYYCAAGELRVVRHNYWGQGTQVTVSS

SEQ ID NO: 39561 - protein, 125 aa, Artificial Sequence
  Chemically Synthesized
QVQLQESGGGLVQAGGSLRLSCAASGSIFNYYIMGWYRQAPGKEREFVASIGTVLVPYADSVKGRFTISRDNAKNTVYLQMNSLKPEDTAVYYCAFGSNVCTGGTLLRMTVVIYWGQGTQVTVSS

SEQ ID NO: 39562 - protein, 122 aa, Artificial Sequence
  Chemically Synthesized
QVQLQESGGGLVQAGGSLRLSCAASGNISGVSYMGWYRQAPGKERELVASIDKGATTNYADSVKGRFTISRDNAKNTVYLQMNSLKPEDTAVYYCAADLTFDYVTYAHFVYWGQGTQVTVSS

SEQ ID NO: 39563 - protein, 125 aa, Artificial Sequence
  Chemically Synthesized
QVQLQESGGGLVQAGGSLRLSCAASGSIFDADTMGWYRQAPGKEREFVAGINGGGNPYADSVKGRFTISRDNAKNTVYLQMNSLKPEDTAVYYCAVYESVFWQRGITTDYHHGYWGQGTQVTVSS

SEQ ID NO: 39564 - protein, 118 aa, Artificial Sequence
  Chemically Synthesized
QVQLQESGGGLVQAGGSLRLSCAASGYISYAFYMGWYRQAPGKERELVAAIDQGSNTNYADSVKGRFTISRDNAKNTVYLQMNSLKPEDTAVYYCAVYRNVYDYHPYWGQGTQVTVSS

SEQ ID NO: 39565 - protein, 118 aa, Artificial Sequence
  Chemically Synthesized
QVQLQESGGGLVQAGGSLRLSCAASGYISYIYYMGWYRQAPGKEREFVASITPGSITNYADSVKGRFTISRDNAKNTVYLQMNSLKPEDTAVYYCAVDGERPWYLSYWGQGTQVTVSS

SEQ ID NO: 39566 - protein, 117 aa, Artificial Sequence
  Chemically Synthesized
QVQLQESGGGLVQAGGSLRLSCAASGTILTLTMGWYRQAPGKEREFVASISYGGSTNYADSVKGRFTISRDNAKNTVYLQMNSLKPEDTAVYYCAAWYYYYSWYLYWGQGTQVTVSS

SEQ ID NO: 39567 - protein, 122 aa, Artificial Sequence
  Chemically Synthesized
QVQLQESGGGLVQAGGSLRLSCAASGYIFLDPNMGWYRQAPGKEREFVATITDGTTTNYADSVKGRFTISRDNAKNTVYLQMNSLKPEDTAVYYCAAPTDVLYRGVQVLGYWGQGTQVTVSS

SEQ ID NO: 39568 - protein, 113 aa, Artificial Sequence
  Chemically Synthesized
QVQLQESGGGLVQAGGSLRLSCAASGSISPRYYMGWYRQAPGKERELVATIGQGSSTYYADSVKGRFTISRDNAKNTVYLQMNSLKPEDTAVYYCAATGGTYWGQGTQVTVSS

SEQ ID NO: 39569 - protein, 117 aa, Artificial Sequence
  Chemically Synthesized
QVQLQESGGGLVQAGGSLRLSCAASGSIFTHDDMGWYRQAPGKERELLPLLLKVVVPYADSVKGRFTISRDNAKNTVYLQMNSLKPEDTAVYYCAAHYSYEPDHYYWGQGTQVTVSS

SEQ ID NO: 39570 - protein, 122 aa, Artificial Sequence
  Chemically Synthesized
QVQLQESGGGLVQAGGSLRLSCAASGNIFGDRVMGWYRQAPGKEREFVAAIDIGASTYYADSVKGRFTISRDNAKNTVYLQMNSLKPEDTAVYYCAVWNTRSWARRYVYWYWGQGTQVTVSS

SEQ ID NO: 39571 - protein, 121 aa, Artificial Sequence
  Chemically Synthesized
QVQLQESGGGLVQAGGSLRLSCAASGTISYSTMGWYRQAPGKERELVAGISRGGNTYYADSVKGRFTISRDNAKNTVYLQMNSLKPEDTAVYYCAVGFDNYRGYHADHFYWGQGTQVTVSS

SEQ ID NO: 39572 - protein, 117 aa, Artificial Sequence
  Chemically Synthesized
QVQLQESGGGLVQAGGSLRLSCAASGSISGPAEMGWYRQAPGKEREFASIGVGTTTYYADSVKGRFTISRDNAKNTVYLQMNSLKPEDTAVYYCAVDETWVDYFPYWGQGTQVTVSS

SEQ ID NO: 39573 - protein, 124 aa, Artificial Sequence
  Chemically Synthesized
QVQLQESGGGLVQAGGSLRLSCAASGNIFVYDLMGWYRQAPGKEREFQYDYGSTTYYADSVKGRFTISRDNAKNTVYLQMNSLKPEDTAVYYCAVRSYDDYYRYYWDVERLYYWGQGTQVTVSS

SEQ ID NO: 39574 - protein, 122 aa, Artificial Sequence
  Chemically Synthesized
QVQLQESGGGLVQAGGSLRLSCAASGTIFTLAAMGWYRQAPGKEREFVATIAYGTTTNYADSVKGRFTISRDNAKNTVYLQMNSLKPEDTAVYYCAALVEKHPWGAFPFVYWGQGTQVTVSS

SEQ ID NO: 39575 - protein, 125 aa, Artificial Sequence
  Chemically Synthesized
QVQLQESGGGLVQAGGSLRLSCAASGNIFDGYTMGWYRQAPGKERELVATIALGTTNYADSVKGRFTISRDNAKNTVYLQMNSLKPEDTAVYYCAVYDTTVLYLRYTRDYVHRYWGQGTQVTVSS

SEQ ID NO: 39576 - protein, 117 aa, Artificial Sequence
  Chemically Synthesized
QVQLQESGGGLVQAGGSLRLSCAASGSISGVWSMGWYRQAPGKERELVATISGGAIPYADSVKGRFTISRDNAKNTVYLQMNSLKPEDTAVYYCAVDYVGIYIHYYWGQGTQVTVSS

SEQ ID NO: 39577 - protein, 121 aa, Artificial Sequence
  Chemically Synthesized
QVQLQESGGGLVQAGGSLRLSCAASGNISLYRAMGWYRQAPGKERELVATIGAGGIPYADSVKGRFTISRDNAKNTVYLQMNSLKPEDTAVYYCAVSLADNLINDPTLIYWGQGTQVTVSS

SEQ ID NO: 39578 - protein, 118 aa, Artificial Sequence
  Chemically Synthesized
QVQLQESGGGLVQAGGSLRLSCAASGTIFPAGIMGWYRQAPGKERELVAAITYGAITNYADSVKGRFTISRDNAKNTVYLQMNSLKPEDTAVYYCAAKWRGYRLYVYWGQGTQVTVSS

SEQ ID NO: 39579 - protein, 126 aa, Artificial Sequence
  Chemically Synthesized
QVQLQESGGGLVQAGGSLRLSCAASGTISRNAIMGWYRQAPGKEREFVATIDNGGTTNYADSVKGRFTISRDNAKNTVYLQMNSLKPEDTAVYYCAVSDVDSADYEAVTLADHYYWGQGTQVTVSS

SEQ ID NO: 39580 - protein, 118 aa, Artificial Sequence
  Chemically Synthesized
QVQLQESGGGLVQAGGSLRLSCAASGTISRSQNMGWYRQAPGKERELVAAIADGTTTYYADSVKGRFTISRDNAKNTVYLQMNSLKPEDTAVYYCAVAWDYYYPLDYWGQGTQVTVSS

SEQ ID NO: 39581 - protein, 113 aa, Artificial Sequence
  Chemically Synthesized
QVQLQESGGGLVQAGGSLRLSCAASGTISTGGVMGWYRQAPGKEREFVATITGYADSVKGRFTISRDNAKNTVYLQMNSLKPEDTAVYYCAATYVVGPGYRYWGQGTQVTVSS

SEQ ID NO: 39582 - protein, 122 aa, Artificial Sequence
  Chemically Synthesized
QVQLQESGGGLVQAGGSLRLSCAASGTISKYLIMGWYRQAPGKERELVASISYGTITYYADSVKGRFTISRDNAKNTVYLQMNSLKPEDTAVYYCAVGYYSSDWWNVGFGYWGQGTQVTVSS

SEQ ID NO: 39583 - protein, 122 aa, Artificial Sequence
  Chemically Synthesized
QVQLQESGGGLVQAGGSLRLSCAASGTISSRQYMGWYRQAPGKEREFVASISSGSNTYYADSVKGRFTISRDNAKNTVYLQMNSLKPEDTAVYYCAAVYPRQVPYSTSYVYWGQGTQVTVSS

SEQ ID NO: 39584 - protein, 121 aa, Artificial Sequence
  Chemically Synthesized
QVQLQESGGGLVQAGGSLRLSCAASGYISYQWGMGWYRQAPGKERELVATIARGGNTNYADSVKGRFTISRDNAKNTVYLQMNSLKPEDTAVYYCAAGPSGVLTPCSVSYWGQGTQVTVSS

SEQ ID NO: 39585 - protein, 125 aa, Artificial Sequence
  Chemically Synthesized
QVQLQESGGGLVQAGGSLRLSCAASGNISTAIYMGWYRQAPGKEREFVAGITEGSTTNYADSVKGRFTISRDNAKNTVYLQMNSLKPEDTAVYYCAVGPGTYQLTDSAYAAFDYWGQGTQVTVSS

SEQ ID NO: 39586 - protein, 122 aa, Artificial Sequence
  Chemically Synthesized
QVQLQESGGGLVQAGGSLRLSCAASGSISQRTDMGWYRQAPGKEREFVAGISGGSNTYYADSVKGRFTISRDNAKNTVYLQMNSLKPEDTAVYYCAASRYGTYGRYATLTYWGQGTQVTVSS

SEQ ID NO: 39587 - protein, 121 aa, Artificial Sequence
  Chemically Synthesized
QVQLQESGGGLVQAGGSLRLSCAASGSIFDYASMGWYRQAPGKEREFVAGIAYRCYYLYADSVKGRFTISRDNAKNTVYLQMNSLKPEDTAVYYCAVYTPYDCVNCTLFYWGQGTQVTVSS

SEQ ID NO: 39588 - protein, 126 aa, Artificial Sequence
  Chemically Synthesized
QVQLQESGGGLVQAGGSLRLSCAASGSISSWTQMGWYRQAPGKERELVAAINQGTTTNYADSVKGRFTISRDNAKNTVYLQMNSLKPEDTAVYYCAAAAPAADLIRSRTGYGLKYWGQGTQVTVSS

SEQ ID NO: 39589 - protein, 114 aa, Artificial Sequence
  Chemically Synthesized
QVQLQESGGGLVQAGGSLRLSCAASGTIFMGWYRQAPGKERELVAAITLGANTNYADSVKGRFTISRDNAKNTVYLQMNSLKPEDTAVYYCAVISRVVLVHAYWGQGTQVTVSS

SEQ ID NO: 39590 - protein, 122 aa, Artificial Sequence
  Chemically Synthesized
QVQLQESGGGLVQAGGSLRLSCAASGTIFTDSRMGWYRQAPGKEREFVASIADGGNTNYADSVKGRFTISRDNAKNTVYLQMNSLKPEDTAVYYCAAREEDYSSILTGYPYWGQGTQVTVSS

SEQ ID NO: 39591 - protein, 118 aa, Artificial Sequence
  Chemically Synthesized
QVQLQESGGGLVQAGGSLRLSCAASGTISIDVYMGWYRQAPGKERELVASIDQGGTTYYADSVKGRFTISRDNAKNTVYLQMNSLKPEDTAVYYCAVKGFSGDDFQYWGQGTQVTVSS

SEQ ID NO: 39592 - protein, 126 aa, Artificial Sequence
  Chemically Synthesized
QVQLQESGGGLVQAGGSLRLSCAASGTIFDPSKMGWYRQAPGKEREFVASINVGTITNYADSVKGRFTISRDNAKNTVYLQMNSLKPEDTAVYYCAVSINNGGYAFEQYDTRFAYWGQGTQVTVSS

SEQ ID NO: 39593 - protein, 126 aa, Artificial Sequence
  Chemically Synthesized
QVQLQESGGGLVQAGGSLRLSCAASGNISAWRKMGWYRQAPGKEREFVASIDKGTTTNYADSVKGRFTISRDNAKNTVYLQMNSLKPEDTAVYYCAVSDGLDVYAQDDTPDIFGYWGQGTQVTVSS

SEQ ID NO: 39594 - protein, 118 aa, Artificial Sequence
  Chemically Synthesized
QVQLQESGGGLVQAGGSLRLSCAASGSIFASHTMGWYRQAPGKEREFVASIGVGTSTYYADSVKGRFTISRDNAKNTVYLQMNSLKPEDTAVYYCAAVQFGLTIFYYWGQGTQVTVSS

SEQ ID NO: 39595 - protein, 118 aa, Artificial Sequence
  Chemically Synthesized
QVQLQESGGGLVQAGGSLRLSCAASGYISARTGMGWYRQAPGKERELVATINSGTSTNYADSVKGRFTISRDNAKNTVYLQMNSLKPEDTAVYYCAAGSTEYYRFAYWGQGTQVTVSS

SEQ ID NO: 39596 - protein, 122 aa, Artificial Sequence
  Chemically Synthesized
QVQLQESGGGLVQAGGSLRLSCAASGYISTLTSMGWYRQAPGKEREFVAGIDQGAITYYADSVKGRFTISRDNAKNTVYLQMNSLKPEDTAVYYCAVYDYWYYQYTPSHPYWGQGTQVTVSS

SEQ ID NO: 39597 - protein, 118 aa, Artificial Sequence
  Chemically Synthesized
QVQLQESGGGLVQAGGSLRLSCAASGTISHYDYMGWYRQAPGKEREFVASIGSGASTNYADSVKGRFTISRDNAKNTVYLQMNSLKPEDTAVYYCAAQIIEWPYFRYWGQGTQVTVSS

SEQ ID NO: 39598 - protein, 110 aa, Artificial Sequence
  Chemically Synthesized
QVQLQESGGGLVQAGGSLRLSCAASGTISYSTTMGWYRQAPGKEREFVAAIGRGGTTYYADSVKGRFTISRDNAKNTVYLQMNSLKPEDTAVYYCAVLYWGQGTQVTVSS

SEQ ID NO: 39599 - protein, 121 aa, Artificial Sequence
  Chemically Synthesized
QVQLQESGGGLVQAGGSLRLSCAASGNISYWYFMGWYRQAPGKEREFVAGIASVVLPYADSVKGRFTISRDNAKNTVYLQMNSLKPEDTAVYYCAVPVTNYYFVQQGYRYWGQGTQVTVSS

SEQ ID NO: 39600 - protein, 117 aa, Artificial Sequence
  Chemically Synthesized
QVQLQESGGGLVQAGGSLRLSCAASGTISGDHYMGWYRQAPGKERELVASIAYGTSTNYADSVKGRFTISRDNAKNTVYLQMNSLKPEDTAVYYCAASASTNTLLYWGQGTQVTVSS

SEQ ID NO: 39601 - protein, 117 aa, Artificial Sequence
  Chemically Synthesized
QVQLQESGGGLVQAGGSLRLSCAASGYIFAWDIMGWYRQAPGKEREFVATIAPGASTYYADSVKGRFTISRDNAKNTVYLQMNSLKPEDTAVYYCAATVWLWLLYYWGQGTQVTVSS

SEQ ID NO: 39602 - protein, 118 aa, Artificial Sequence
  Chemically Synthesized
QVQLQESGGGLVQAGGSLRLSCAASGTIFQDHTMGWYRQAPGKEREFVAGIDNGSNTNYADSVKGRFTISRDNAKNTVYLQMNSLKPEDTAVYYCAAGDDDGDSHPYWGQGTQVTVSS

SEQ ID NO: 39603 - protein, 118 aa, Artificial Sequence
  Chemically Synthesized
QVQLQESGGGLVQAGGSLRLSCAASGNISYGAVMGWYRQAPGKERELVAAIDAGTTTYYADSVKGRFTISRDNAKNTVYLQMNSLKPEDTAVYYCAVDDNLRYVFRYWGQGTQVTVSS

SEQ ID NO: 39604 - protein, 116 aa, Artificial Sequence
  Chemically Synthesized
QVQLQESGGGLVQAGGSLRLSCAASGSISFQADMGWYRQAPGKERELVASISPGSTTYADSVKGRFTISRDNAKNTVYLQMNSLKPEDTAVYYCAVGTSTTTCMYWGQGTQVTVSS

SEQ ID NO: 39605 - protein, 118 aa, Artificial Sequence
  Chemically Synthesized
QVQLQESGGGLVQAGGSLRLSCAASGYISSVDDMGWYRQAPGKERELVASIDEGGNTNYADSVKGRFTISRDNAKNTVYLQMNSLKPEDTAVYYCAVDYDTDPTLIYWGQGTQVTVSS

SEQ ID NO: 39606 - protein, 122 aa, Artificial Sequence
  Chemically Synthesized
QVQLQESGGGLVQAGGSLRLSCAASGSISIDVYMGWYRQAPGKERELVAAIATGAITYYADSVKGRFTISRDNAKNTVYLQMNSLKPEDTAVYYCAVVHTLDTIDYESHYYWGQGTQVTVSS

SEQ ID NO: 39607 - protein, 122 aa, Artificial Sequence
  Chemically Synthesized
QVQLQESGGGLVQAGGSLRLSCAASGTISYPDFMGWYRQAPGKERELVASISGGSTTYYADSVKGRFTISRDNAKNTVYLQMNSLKPEDTAVYYCAAVLADYNWYTAWHDYWGQGTQVTVSS

SEQ ID NO: 39608 - protein, 118 aa, Artificial Sequence
  Chemically Synthesized
QVQLQESGGGLVQAGGSLRLSCAASGYISRGWYMGWYRQAPGKEREFVATIGNGGITYYADSVKGRFTISRDNAKNTVYLQMNSLKPEDTAVYYCAVYYRQDYQYDYWGQGTQVTVSS

SEQ ID NO: 39609 - protein, 122 aa, Artificial Sequence
  Chemically Synthesized
QVQLQESGGGLVQAGGSLRLSCAASGYISFRQDMGWYRQAPGKEREFVASIGLGTITYYADSVKGRFTISRDNAKNTVYLQMNSLKPEDTAVYYCAADYILGYVKGSSHTYWGQGTQVTVSS

SEQ ID NO: 39610 - protein, 122 aa, Artificial Sequence
  Chemically Synthesized
QVQLQESGGGLVQAGGSLRLSCAASGNISTDYAMGWYRQAPGKEREFVAGIDDGGNTNYADSVKGRFTISRDNAKNTVYLQMNSLKPEDTAVYYCAVWLTRRDWDQYSHIYWGQGTQVTVSS

SEQ ID NO: 39611 - protein, 122 aa, Artificial Sequence
  Chemically Synthesized
QVQLQESGGGLVQAGGSLRLSCAASGTIFSTFTMGWYRQAPGKERELVAGITDGASTNYADSVKGRFTISRDNAKNTVYLQMNSLKPEDTAVYYCAADTWQLNDSLYVHDYWGQGTQVTVSS

SEQ ID NO: 39612 - protein, 121 aa, Artificial Sequence
  Chemically Synthesized
QVQLQESGGGLVQAGGSLRLSCAASGTIFLSGYMGWYRQAPGKEREFVATLLVVVVPYADSVKGRFTISRDNAKNTVYLQMNSLKPEDTAVYYCAATWYDQVQDFHLHRYWGQGTQVTVSS

SEQ ID NO: 39613 - protein, 111 aa, Artificial Sequence
  Chemically Synthesized
QVQLQESGGGLVQAGGSLRLSCAASGSIFSRSGMGWYRQAPGKEREFVAAISRGANTYYADSVKGRFTISRDNAKNTVYLQMNSLKPEDTAVYYCAVTIYWGQGTQVTVSS

SEQ ID NO: 39614 - protein, 118 aa, Artificial Sequence
  Chemically Synthesized
QVQLQESGGGLVQAGGSLRLSCAASGNISDDGQMGWYRQAPGKEREFVDGINDGTSTYYADSVKGRFTISRDNAKNTVYLQMNSLKPEDTAVYYCAAWIRNTRYHQYWGQGTQVTVSS

SEQ ID NO: 39615 - protein, 117 aa, Artificial Sequence
  Chemically Synthesized
QVQLQESGGGLVQAGGSLRLSCAASGNIFYYLHMGWYRQAPGKEREFVASINTVVVPYADSVKGRFTISRDNAKNTVYLQMNSLKPEDTAVYYCAVRAYGYNHYVYWGQGTQVTVSS

SEQ ID NO: 39616 - protein, 118 aa, Artificial Sequence
  Chemically Synthesized
QVQLQESGGGLVQAGGSLRLSCAASGTIFGVYYMGWYRQAPGKEREFVATITGGTITYYADSVKGRFTISRDNAKNTVYLQMNSLKPEDTAVYYCAVYGADSTYHGYWGQGTQVTVSS

SEQ ID NO: 39617 - protein, 118 aa, Artificial Sequence
  Chemically Synthesized
QVQLQESGGGLVQAGGSLRLSCAASGNISSGVTMGWYRQAPGKEREFVATITQGAITYYADSVKGRFTISRDNAKNTVYLQMNSLKPEDTAVYYCAALDDADSYHPYWGQGTQVTVSS

SEQ ID NO: 39618 - protein, 113 aa, Artificial Sequence
  Chemically Synthesized
QVQLQESGGGLVQAGGSLRLSCAASGTISTYVDMGWYRQAPGKEREFVAAIGRGGNTYYADSVKGRFTISRDNAKNTVYLQMNSLKPEDTAVYYCAAAGHSYWGQGTQVTVSS

SEQ ID NO: 39619 - protein, 118 aa, Artificial Sequence
  Chemically Synthesized
QVQLQESGGGLVQAGGSLRLSCAASGSISRNAAMGWYRQAPGKEREFVASITVGSSTYYADSVKGRFTISRDNAKNTVYLQMNSLKPEDTAVYYCAVVGTDSRSLPYWGQGTQVTVSS

SEQ ID NO: 39620 - protein, 126 aa, Artificial Sequence
  Chemically Synthesized
QVQLQESGGGLVQAGGSLRLSCAASGYISLRVDMGWYRQAPGKERELVASISYGSSTYYADSVKGRFTISRDNAKNTVYLQMNSLKPEDTAVYYCAAVKAIPQRRGRTNNQQLDYWGQGTQVTVSS

SEQ ID NO: 39621 - protein, 118 aa, Artificial Sequence
  Chemically Synthesized
QVQLQESGGGLVQAGGSLRLSCAASGYISVPSLMGWYRQAPGKEREFVATISRGGTTYYADSVKGRFTISRDNAKNTVYLQMNSLKPEDTAVYYCAAAQYGETVFQYWGQGTQVTVSS

SEQ ID NO: 39622 - protein, 126 aa, Artificial Sequence
  Chemically Synthesized
QVQLQESGGGLVQAGGSLRLSCAASGNISALADMGWYRQAPGKERELVATIGVGATTNYADSVKGRFTISRDNAKNTVYLQMNSLKPEDTAVYYCAAVLAGTYNRKSPSRPTHNYWGQGTQVTVSS

SEQ ID NO: 39623 - protein, 118 aa, Artificial Sequence
  Chemically Synthesized
QVQLQESGGGLVQAGGSLRLSCAASGTISIVPSMGWYRQAPGKEREFVATISSGTNTYYADSVKGRFTISRDNAKNTVYLQMNSLKPEDTAVYYCAAYYWWYPYYAYWGQGTQVTVSS

SEQ ID NO: 39624 - protein, 126 aa, Artificial Sequence
  Chemically Synthesized
QVQLQESGGGLVQAGGSLRLSCAASGTIFGKGLMGWYRQAPGKEREFVASINAGSSTNYADSVKGRFTISRDNAKNTVYLQMNSLKPEDTAVYYCAVDGSSRNRWLGTLTAPHFYWGQGTQVTVSS

SEQ ID NO: 39625 - protein, 126 aa, Artificial Sequence
  Chemically Synthesized
QVQLQESGGGLVQAGGSLRLSCAASGNISGYGRMGWYRQAPGKEREFVASIGYGGNTNYADSVKGRFTISRDNAKNTVYLQMNSLKPEDTAVYYCAAEAYIHTTQLVWPLDGFRYWGQGTQVTVSS

SEQ ID NO: 39626 - protein, 117 aa, Artificial Sequence
  Chemically Synthesized
QVQLQESGGGLVQAGGSLRLSCAASGTIFRLSNMGWYRQAPGKERELVASITTGAITYYADSVKGRFTISRDNAKNTVYLQMNSLKPEDTAVYYCAVTYYRPTSLYWGQGTQVTVSS

SEQ ID NO: 39627 - protein, 122 aa, Artificial Sequence
  Chemically Synthesized
QVQLQESGGGLVQAGGSLRLSCAASGTIFGTSDMGWYRQAPGKEREFVAAITTGAITYYADSVKGRFTISRDNAKNTVYLQMNSLKPEDTAVYYCAVTKIGSYDVDVLLYYWGQGTQVTVSS

SEQ ID NO: 39628 - protein, 125 aa, Artificial Sequence
  Chemically Synthesized
QVQLQESGGGLVQAGGSLRLSCAASGNIFPYTSMGWYRQAPGKEREFVATITEGSTTNYADSVKGRFTISRDNAKNTVYLQMNSLKPEDTAVYYCAVLYDLGSLTFRLTTLLIYWGQGTQVTVSS

SEQ ID NO: 39629 - protein, 126 aa, Artificial Sequence
  Chemically Synthesized
QVQLQESGGGLVQAGGSLRLSCAASGNISDWKDMGWYRQAPGKEREFVAGINAGGNTNYADSVKGRFTISRDNAKNTVYLQMNSLKPEDTAVYYCAVYDNIYWRRRATAPYGYVYWGQGTQVTVSS

SEQ ID NO: 39630 - protein, 122 aa, Artificial Sequence
  Chemically Synthesized
QVQLQESGGGLVQAGGSLRLSCAASGSIFRSSYMGWYRQAPGKERELVAAINGGATTNYADSVKGRFTISRDNAKNTVYLQMNSLKPEDTAVYYCAVDGYDWYQDWHDHPYWGQGTQVTVSS

SEQ ID NO: 39631 - protein, 121 aa, Artificial Sequence
  Chemically Synthesized
QVQLQESGGGLVQAGGSLRLSCAASGNIFRYTNMGWYRQAPGKERELVPLLVRVVVPYADSVKGRFTISRDNAKNTVYLQMNSLKPEDTAVYYCAVTRYYLARSFDTFAYWGQGTQVTVSS

SEQ ID NO: 39632 - protein, 121 aa, Artificial Sequence
  Chemically Synthesized
QVQLQESGGGLVQAGGSLRLSCAASGTISTPGMGWYRQAPGKERELVAAIDAGANTNYADSVKGRFTISRDNAKNTVYLQMNSLKPEDTAVYYCAVDEGTATHDYYYFSYWGQGTQVTVSS

SEQ ID NO: 39633 - protein, 122 aa, Artificial Sequence
  Chemically Synthesized
QVQLQESGGGLVQAGGSLRLSCAASGSIFVGYYMGWYRQAPGKERELVATISDGGITNYADSVKGRFTISRDNAKNTVYLQMNSLKPEDTAVYYCAVTHRTEEYPGAVHWYWGQGTQVTVSS

SEQ ID NO: 39634 - protein, 118 aa, Artificial Sequence
  Chemically Synthesized
QVQLQESGGGLVQAGGSLRLSCAASGNISGEFVMGWYRQAPGKERELVAAIDYGSITYYADSVKGRFTISRDNAKNTVYLQMNSLKPEDTAVYYCAVSTYAPWSHFYWGQGTQVTVSS

SEQ ID NO: 39635 - protein, 122 aa, Artificial Sequence
  Chemically Synthesized
QVQLQESGGGLVQAGGSLRLSCAASGTISLPRYMGWYRQAPGKEREFVAGIGDGGTTNYADSVKGRFTISRDNAKNTVYLQMNSLKPEDTAVYYCAAWPNVTIYTVDDLYYWGQGTQVTVSS

SEQ ID NO: 39636 - protein, 118 aa, Artificial Sequence
  Chemically Synthesized
QVQLQESGGGLVQAGGSLRLSCAASGTIFFVVYMGWYRQAPGKERELVAAIANGTTTYYADSVKGRFTISRDNAKNTVYLQMNSLKPEDTAVYYCAANVPYPWNFSYWGQGTQVTVSS

SEQ ID NO: 39637 - protein, 117 aa, Artificial Sequence
  Chemically Synthesized
QVQLQESGGGLVQAGGSLRLSCAASGNIFLRRAMGWYRQAPGKEREFVAGINHGTTTYADSVKGRFTISRDNAKNTVYLQMNSLKPEDTAVYYCAAGDSLYLPYDYWGQGTQVTVSS

SEQ ID NO: 39638 - protein, 126 aa, Artificial Sequence
  Chemically Synthesized
QVQLQESGGGLVQAGGSLRLSCAASGSISYYGSMGWYRQAPGKEREFVASITDGGNTYYADSVKGRFTISRDNAKNTVYLQMNSLKPEDTAVYYCAVLPWRYFDDGPRQGRTLGYWGQGTQVTVSS

SEQ ID NO: 39639 - protein, 121 aa, Artificial Sequence
  Chemically Synthesized
QVQLQESGGGLVQAGGSLRLSCAASGSIFDQSMGWYRQAPGKEREFVAAITNGAITNYADSVKGRFTISRDNAKNTVYLQMNSLKPEDTAVYYCAAYALRIFGYSSIHQYWGQGTQVTVSS

SEQ ID NO: 39640 - protein, 118 aa, Artificial Sequence
  Chemically Synthesized
QVQLQESGGGLVQAGGSLRLSCAASGNISTRYYMGWYRQAPGKEREFVAGISDGTITYYADSVKGRFTISRDNAKNTVYLQMNSLKPEDTAVYYCAARGRASYGHEYWGQGTQVTVSS

SEQ ID NO: 39641 - protein, 118 aa, Artificial Sequence
  Chemically Synthesized
QVQLQESGGGLVQAGGSLRLSCAASGYIFPIYIMGWYRQAPGKERELVAAIAVGSSTNYADSVKGRFTISRDNAKNTVYLQMNSLKPEDTAVYYCAVHYAYIIEHGYWGQGTQVTVSS

SEQ ID NO: 39642 - protein, 118 aa, Artificial Sequence
  Chemically Synthesized
QVQLQESGGGLVQAGGSLRLSCAASGTISQLVYMGWYRQAPGKERELVAAIDYGGSTNYADSVKGRFTISRDNAKNTVYLQMNSLKPEDTAVYYCAAYDAKITAHRYWGQGTQVTVSS

SEQ ID NO: 39643 - protein, 118 aa, Artificial Sequence
  Chemically Synthesized
QVQLQESGGGLVQAGGSLRLSCAASGYISTGIYMGWYRQAPGKERELVASIGYGGTTNYADSVKGRFTISRDNAKNTVYLQMNSLKPEDTAVYYCAARSDIYPYLGYWGQGTQVTVSS

SEQ ID NO: 39644 - protein, 122 aa, Artificial Sequence
  Chemically Synthesized
QVQLQESGGGLVQAGGSLRLSCAASGNIFWYSAMGWYRQAPGKERELVAAIGWGGSTYYADSVKGRFTISRDNAKNTVYLQMNSLKPEDTAVYYCAVAYLNGGIYSAIHLYWGQGTQVTVSS

SEQ ID NO: 39645 - protein, 123 aa, Artificial Sequence
  Chemically Synthesized
QVQLQESGGGLVQAGGSLRLSCAASGYIFARYEGMGWYRQAPGKERELVAGINWGGTTYYADSVKGRFTISRDNAKNTVYLQMNSLKPEDTAVYYCAVSIYLSDLYNYPYTYWGQGTQVTVSS

SEQ ID NO: 39646 - protein, 118 aa, Artificial Sequence
  Chemically Synthesized
QVQLQESGGGLVQAGGSLRLSCAASGTISLYYLMGWYRQAPGKERELVASITNGTNTYYADSVKGRFTISRDNAKNTVYLQMNSLKPEDTAVYYCAAPDPLADGFFYWGQGTQVTVSS

SEQ ID NO: 39647 - protein, 122 aa, Artificial Sequence
  Chemically Synthesized
QVQLQESGGGLVQAGGSLRLSCAASGNIFVGYAMGWYRQAPGKERELVAAITYGANTYYADSVKGRFTISRDNAKNTVYLQMNSLKPEDTAVYYCAAAYDFIFDDAGPLSYWGQGTQVTVSS

SEQ ID NO: 39648 - protein, 119 aa, Artificial Sequence
  Chemically Synthesized
QVQLQESGGGLVQAGGSLRLSCAASGTIFYYYGMGWYRQAPGKERELVAGIDYGSSTNYADSVKGRFTISRDNAKNTVYLQMNSLKPEDTAVYYCAAVVWEDPWYYDYWGQGTQVTVSS

SEQ ID NO: 39649 - protein, 125 aa, Artificial Sequence
  Chemically Synthesized
QVQLQESGGGLVQAGGSLRLSCAASGSISGFVYMGWYRQAPGKERELVAGIAIGTNTYYADSVKGRFTISRDNAKNTVYLQMNSLKPEDTAVYYCAAGLGIASFRRLLTVTLLYWGQGTQVTVSS

SEQ ID NO: 39650 - protein, 122 aa, Artificial Sequence
  Chemically Synthesized
QVQLQESGGGLVQAGGSLRLSCAASGSIFDAEVMGWYRQAPGKERELVAGITRGSTTNYADSVKGRFTISRDNAKNTVYLQMNSLKPEDTAVYYCAVRALADHTTYRLYAYWGQGTQVTVSS

SEQ ID NO: 39651 - protein, 119 aa, Artificial Sequence
  Chemically Synthesized
QVQLQESGGGLVQAGGSLRLSCAASGSISLSDIMGWYRQAPGKEREFVAGIGQGTNTNYADSVKGRFTISRDNAKNTVYLQMNSLKPEDTAVYYCAASKDTYRGKYRYWGQGTQVTVSS

SEQ ID NO: 39652 - protein, 118 aa, Artificial Sequence
  Chemically Synthesized
QVQLQESGGGLVQAGGSLRLSCAASGNISSYPYMGWYRQAPGKEREFVASIDRGSITYYADSVKGRFTISRDNAKNTVYLQMNSLKPEDTAVYYCAAYTYAGLLLYYWGQGTQVTVSS

SEQ ID NO: 39653 - protein, 126 aa, Artificial Sequence
  Chemically Synthesized
QVQLQESGGGLVQAGGSLRLSCAASGTIFGPGLMGWYRQAPGKERELVATIDGGASTYYADSVKGRFTISRDNAKNTVYLQMNSLKPEDTAVYYCAVPYIWYRYAYSNYFGGLDYWGQGTQVTVSS

SEQ ID NO: 39654 - protein, 118 aa, Artificial Sequence
  Chemically Synthesized
QVQLQESGGGLVQAGGSLRLSCAASGNIFIFVRMGWYRQAPGKERELVASIAYGTSTYYADSVKGRFTISRDNAKNTVYLQMNSLKPEDTAVYYCAAINEVLQQLAYWGQGTQVTVSS

SEQ ID NO: 39655 - protein, 122 aa, Artificial Sequence
  Chemically Synthesized
QVQLQESGGGLVQAGGSLRLSCAASGYIFNLSGMGWYRQAPGKEREFVASIGSGTITYYADSVKGRFTISRDNAKNTVYLQMNSLKPEDTAVYYCAAYAWTQRVGPYRHIYWGQGTQVTVSS

SEQ ID NO: 39656 - protein, 118 aa, Artificial Sequence
  Chemically Synthesized
QVQLQESGGGLVQAGGSLRLSCAASGYIFVVRQMGWYRQAPGKERELVASITWGGSTYYADSVKGRFTISRDNAKNTVYLQMNSLKPEDTAVYYCAVLPIPYLFYWYWGQGTQVTVSS

SEQ ID NO: 39657 - protein, 118 aa, Artificial Sequence
  Chemically Synthesized
QVQLQESGGGLVQAGGSLRLSCAASGYISRSTSMGWYRQAPGKERELVAGIDSGTITNYADSVKGRFTISRDNAKNTVYLQMNSLKPEDTAVYYCAVQLLDRNTHEYWGQGTQVTVSS

SEQ ID NO: 39658 - protein, 126 aa, Artificial Sequence
  Chemically Synthesized
QVQLQESGGGLVQAGGSLRLSCAASGTISSAYDMGWYRQAPGKEREFVASISYGTSTNYADSVKGRFTISRDNAKNTVYLQMNSLKPEDTAVYYCAVFDPLTYTSATPPRSPHQYWGQGTQVTVSS

SEQ ID NO: 39659 - protein, 114 aa, Artificial Sequence
  Chemically Synthesized
QVQLQESGGGLVQAGGSLRLSCAASGITDMGWYRQAPGKERELVAGIGIGTTTYYADSVKGRFTISRDNAKNTVYLQMNSLKPEDTAVYYCAALGPARSDLLYWGQGTQVTVSS

SEQ ID NO: 39660 - protein, 118 aa, Artificial Sequence
  Chemically Synthesized
QVQLQESGGGLVQAGGSLRLSCAASGTISRGGLMGWYRQAPGKEREFVAGIDAGGSTNYADSVKGRFTISRDNAKNTVYLQMNSLKPEDTAVYYCAVVTTSRGLHYYWGQGTQVTVSS

SEQ ID NO: 39661 - protein, 125 aa, Artificial Sequence
  Chemically Synthesized
QVQLQESGGGLVQAGGSLRLSCAASGTIFDDSLMGWYRQAPGKERELVATIAVGSITNYADSVKGRFTISRDNAKNTVYLQMNSLKPEDTAVYYCAAPDPYLWFITYQDPWFYYWGQGTQVTVSS

SEQ ID NO: 39662 - protein, 118 aa, Artificial Sequence
  Chemically Synthesized
QVQLQESGGGLVQAGGSLRLSCAASGTISGRAYMGWYRQAPGKEREFVASINIGGTTYYADSVKGRFTISRDNAKNTVYLQMNSLKPEDTAVYYCAVDARYDDDLDYWGQGTQVTVSS

SEQ ID NO: 39663 - protein, 118 aa, Artificial Sequence
  Chemically Synthesized
QVQLQESGGGLVQAGGSLRLSCAASGNISSPGYMGWYRQAPGKERELVAAIAPGANTNYADSVKGRFTISRDNAKNTVYLQMNSLKPEDTAVYYCAAIVYVGQWYSYWGQGTQVTVSS

SEQ ID NO: 39664 - protein, 118 aa, Artificial Sequence
  Chemically Synthesized
QVQLQESGGGLVQAGGSLRLSCAASGTIFDYPYMGWYRQAPGKEREFVAAIGDGGSTNYADSVKGRFTISRDNAKNTVYLQMNSLKPEDTAVYYCAAISYRRGYFAYWGQGTQVTVSS

SEQ ID NO: 39665 - protein, 121 aa, Artificial Sequence
  Chemically Synthesized
QVQLQESGGGLVQAGGSLRLSCAASGNIFFRTAMGWYRQAPGKERELVATITYGASTNYADSVKGRFTISRDNAKNTVYLQMNSLKPEDTAVYYCAAHFIAQPIAYHSLYWGQGTQVTVSS

SEQ ID NO: 39666 - protein, 118 aa, Artificial Sequence
  Chemically Synthesized
QVQLQESGGGLVQAGGSLRLSCAASGTISRSDYMGWYRQAPGKERELVAAIGSGTSTNYADSVKGRFTISRDNAKNTVYLQMNSLKPEDTAVYYCAAVTYSRGYHGYWGQGTQVTVSS

SEQ ID NO: 39667 - protein, 122 aa, Artificial Sequence
  Chemically Synthesized
QVQLQESGGGLVQAGGSLRLSCAASGTISSPIYMGWYRQAPGKEREFVAAIGYGASTNYADSVKGRFTISRDNAKNTVYLQMNSLKPEDTAVYYCAAITLSQTYTGPHLYYWGQGTQVTVSS

SEQ ID NO: 39668 - protein, 126 aa, Artificial Sequence
  Chemically Synthesized
QVQLQESGGGLVQAGGSLRLSCAASGTIFAYWGMGWYRQAPGKERELVATIGYGANTNYADSVKGRFTISRDNAKNTVYLQMNSLKPEDTAVYYCAAPRIYLLIFVTIDPPYHDYWGQGTQVTVSS

SEQ ID NO: 39669 - protein, 118 aa, Artificial Sequence
  Chemically Synthesized
QVQLQESGGGLVQAGGSLRLSCAASGNISRGPYMGWYRQAPGKEREFVAAIDYGSITNYADSVKGRFTISRDNAKNTVYLQMNSLKPEDTAVYYCAAVYLGRGYLYYWGQGTQVTVSS

SEQ ID NO: 39670 - protein, 117 aa, Artificial Sequence
  Chemically Synthesized
QVQLQESGGGLVQAGGSLRLSCAASGTISRYLTMGWYRQAPGKEREFVATILTVVLPYADSVKGRFTISRDNAKNTVYLQMNSLKPEDTAVYYCAVEDWYYVVHGYWGQGTQVTVSS

SEQ ID NO: 39671 - protein, 122 aa, Artificial Sequence
  Chemically Synthesized
QVQLQESGGGLVQAGGSLRLSCAASGSIFADPWMGWYRQAPGKEREFVASIAIGGTTNYADSVKGRFTISRDNAKNTVYLQMNSLKPEDTAVYYCAVIVWVLSHWYDLYEYWGQGTQVTVSS

SEQ ID NO: 39672 - protein, 118 aa, Artificial Sequence
  Chemically Synthesized
QVQLQESGGGLVQAGGSLRLSCAASGTIFGYAVMGWYRQAPGKEREFVAGIDYGATTNYADSVKGRFTISRDNAKNTVYLQMNSLKPEDTAVYYCAALTYKYGVHYYWGQGTQVTVSS

SEQ ID NO: 39673 - protein, 117 aa, Artificial Sequence
  Chemically Synthesized
QVQLQESGGGLVQAGGSLRLSCAASGNIFGDYMGWYRQAPGKEREFVAAIGYGASTNYADSVKGRFTISRDNAKNTVYLQMNSLKPEDTAVYYCAAKGWPAVYHTYWGQGTQVTVSS

SEQ ID NO: 39674 - protein, 118 aa, Artificial Sequence
  Chemically Synthesized
QVQLQESGGGLVQAGGSLRLSCAASGNISRPYLMGWYRQAPGKEREFVAGIDQGASTNYADSVKGRFTISRDNAKNTVYLQMNSLKPEDTAVYYCAAINLRGEHFYYWGQGTQVTVSS

SEQ ID NO: 39675 - protein, 118 aa, Artificial Sequence
  Chemically Synthesized
QVQLQESGGGLVQAGGSLRLSCAASGNISVDYLMGWYRQAPGKERELVASINAGGSTYYADSVKGRFTISRDNAKNTVYLQMNSLKPEDTAVYYCAVTDQGKRYYWYWGQGTQVTVSS

SEQ ID NO: 39676 - protein, 118 aa, Artificial Sequence
  Chemically Synthesized
QVQLQESGGGLVQAGGSLRLSCAASGSISATSVMGWYRQAPGKEREFVAAIDPGANTNYADSVKGRFTISRDNAKNTVYLQMNSLKPEDTAVYYCAVVLYGRGYHHYWGQGTQVTVSS

SEQ ID NO: 39677 - protein, 118 aa, Artificial Sequence
  Chemically Synthesized
QVQLQESGGGLVQAGGSLRLSCAASGNISRNNFMGWYRQAPGKEREFVAAIGNGSSTNYADSVKGRFTISRDNAKNTVYLQMNSLKPEDTAVYYCAVLLIYRGFLYYWGQGTQVTVSS

SEQ ID NO: 39678 - protein, 118 aa, Artificial Sequence
  Chemically Synthesized
QVQLQESGGGLVQAGGSLRLSCAASGNISRYSPMGWYRQAPGKERELVASINDGGTTYYADSVKGRFTISRDNAKNTVYLQMNSLKPEDTAVYYCAVDPDIGLLHDYWGQGTQVTVSS

SEQ ID NO: 39679 - protein, 118 aa, Artificial Sequence
  Chemically Synthesized
QVQLQESGGGLVQAGGSLRLSCAASGYISIKYIMGWYRQAPGKEREFVAAITNGTNTYYADSVKGRFTISRDNAKNTVYLQMNSLKPEDTAVYYCAAAYRYKLGLYYWGQGTQVTVSS

SEQ ID NO: 39680 - protein, 126 aa, Artificial Sequence
  Chemically Synthesized
QVQLQESGGGLVQAGGSLRLSCAASGNISDQGPMGWYRQAPGKEREFVASITYGSNTNYADSVKGRFTISRDNAKNTVYLQMNSLKPEDTAVYYCAALYGRRTDYRGTKSSLHYYWGQGTQVTVSS

SEQ ID NO: 39681 - protein, 118 aa, Artificial Sequence
  Chemically Synthesized
QVQLQESGGGLVQAGGSLRLSCAASGTIFRYITMGWYRQAPGKERELVATIAEGTTTNYADSVKGRFTISRDNAKNTVYLQMNSLKPEDTAVYYCAARVTDLFILYYWGQGTQVTVSS

SEQ ID NO: 39682 - protein, 126 aa, Artificial Sequence
  Chemically Synthesized
QVQLQESGGGLVQAGGSLRLSCAASGNISVYVEMGWYRQAPGKERELVAAIAWGSNTYYADSVKGRFTISRDNAKNTVYLQMNSLKPEDTAVYYCAVFGVPIYRPYAHPRGQLDYWGQGTQVTVSS

SEQ ID NO: 39683 - protein, 117 aa, Artificial Sequence
  Chemically Synthesized
QVQLQESGGGLVQAGGSLRLSCAASGNISYVYYMGWYRQAPGKERELVAGISDGVIPYADSVKGRFTISRDNAKNTVYLQMNSLKPEDTAVYYCAVRAWSPYNHIYWGQGTQVTVSS

SEQ ID NO: 39684 - protein, 118 aa, Artificial Sequence
  Chemically Synthesized
QVQLQESGGGLVQAGGSLRLSCAASGNIFGQLWMGWYRQAPGKEREFVAAIDQGTNTNYADSVKGRFTISRDNAKNTVYLQMNSLKPEDTAVYYCAAIHYRFGYYWYWGQGTQVTVSS

SEQ ID NO: 39685 - protein, 122 aa, Artificial Sequence
  Chemically Synthesized
QVQLQESGGGLVQAGGSLRLSCAASGSIFFEPFMGWYRQAPGKERELVATITYGGNTNYADSVKGRFTISRDNAKNTVYLQMNSLKPEDTAVYYCAVPGADTYNITWAYRYWGQGTQVTVSS

SEQ ID NO: 39686 - protein, 122 aa, Artificial Sequence
  Chemically Synthesized
QVQLQESGGGLVQAGGSLRLSCAASGSISVRSDMGWYRQAPGKEREFVATIADGATTNYADSVKGRFTISRDNAKNTVYLQMNSLKPEDTAVYYCAVLAVDQSYDGVNHVYWGQGTQVTVSS

SEQ ID NO: 39687 - protein, 118 aa, Artificial Sequence
  Chemically Synthesized
QVQLQESGGGLVQAGGSLRLSCAASGTISLFGYMGWYRQAPGKEREFVAAIGYGGSTNYADSVKGRFTISRDNAKNTVYLQMNSLKPEDTAVYYCAAIDTLSGLHWYWGQGTQVTVSS

SEQ ID NO: 39688 - protein, 126 aa, Artificial Sequence
  Chemically Synthesized
QVQLQESGGGLVQAGGSLRLSCAASGYISSPSLMGWYRQAPGKEREFVAAIDNGANTNYADSVKGRFTISRDNAKNTVYLQMNSLKPEDTAVYYCAALAYYRGPEDYIDRGWHHYWGQGTQVTVSS

SEQ ID NO: 39689 - protein, 118 aa, Artificial Sequence
  Chemically Synthesized
QVQLQESGGGLVQAGGSLRLSCAASGTISDTFSMGWYRQAPGKERELVAAIAGGGSTNYADSVKGRFTISRDNAKNTVYLQMNSLKPEDTAVYYCAADPPSYSRHAYWGQGTQVTVSS

SEQ ID NO: 39690 - protein, 118 aa, Artificial Sequence
  Chemically Synthesized
QVQLQESGGGLVQAGGSLRLSCAASGNISASYYMGWYRQAPGKEREFVAGIDFGSSTNYADSVKGRFTISRDNAKNTVYLQMNSLKPEDTAVYYCAADYDTPRYHGYWGQGTQVTVSS

SEQ ID NO: 39691 - protein, 118 aa, Artificial Sequence
  Chemically Synthesized
QVQLQESGGGLVQAGGSLRLSCAASGYISGPSVMGWYRQAPGKERELVAAIDSGSSTNYADSVKGRFTISRDNAKNTVYLQMNSLKPEDTAVYYCAALYRSRSYFYYWGQGTQVTVSS

SEQ ID NO: 39692 - protein, 126 aa, Artificial Sequence
  Chemically Synthesized
QVQLQESGGGLVQAGGSLRLSCAASGYIFDPHGMGWYRQAPGKEREFVAGIAYGAITYYADSVKGRFTISRDNAKNTVYLQMNSLKPEDTAVYYCAADVADLDRVWTGAYDDYPYWGQGTQVTVSS

SEQ ID NO: 39693 - protein, 117 aa, Artificial Sequence
  Chemically Synthesized
QVQLQESGGGLVQAGGSLRLSCAASGTIFTLSMGWYRQAPGKERELVATIGRGAITYYADSVKGRFTISRDNAKNTVYLQMNSLKPEDTAVYYCAASWLYSYRLYYWGQGTQVTVSS

SEQ ID NO: 39694 - protein, 122 aa, Artificial Sequence
  Chemically Synthesized
QVQLQESGGGLVQAGGSLRLSCAASGSISDPTYMGWYRQAPGKEREFVAGIGLGTTTYYADSVKGRFTISRDNAKNTVYLQMNSLKPEDTAVYYCAVIFLDRGYRKYYLYYWGQGTQVTVSS

SEQ ID NO: 39695 - protein, 118 aa, Artificial Sequence
  Chemically Synthesized
QVQLQESGGGLVQAGGSLRLSCAASGSISHTDTMGWYRQAPGKEREFVASISRGGITNYADSVKGRFTISRDNAKNTVYLQMNSLKPEDTAVYYCAAFTYYPFVFAYWGQGTQVTVSS

SEQ ID NO: 39696 - protein, 126 aa, Artificial Sequence
  Chemically Synthesized
QVQLQESGGGLVQAGGSLRLSCAASGNIFGYTDMGWYRQAPGKERELVASIGYGATTNYADSVKGRFTISRDNAKNTVYLQMNSLKPEDTAVYYCAVLTAQLPQKYEIWVDWHTYWGQGTQVTVSS

SEQ ID NO: 39697 - protein, 118 aa, Artificial Sequence
  Chemically Synthesized
QVQLQESGGGLVQAGGSLRLSCAASGYISYARVMGWYRQAPGKEREFVAAINDGASTNYADSVKGRFTISRDNAKNTVYLQMNSLKPEDTAVYYCAAIYYDDAYHYYWGQGTQVTVSS

SEQ ID NO: 39698 - protein, 122 aa, Artificial Sequence
  Chemically Synthesized
QVQLQESGGGLVQAGGSLRLSCAASGTISRKRYMGWYRQAPGKEREFVASIAYGTNTYYADSVKGRFTISRDNAKNTVYLQMNSLKPEDTAVYYCAVFDDDARVIAYIFTYWGQGTQVTVSS

SEQ ID NO: 39699 - protein, 121 aa, Artificial Sequence
  Chemically Synthesized
QVQLQESGGGLVQAGGSLRLSCAASGYISASLGMGWYRQAPGKERELVAGIAEVVVPYADSVKGRFTISRDNAKNTVYLQMNSLKPEDTAVYYCAAYTTLFYVSPTYLFYWGQGTQVTVSS

SEQ ID NO: 39700 - protein, 113 aa, Artificial Sequence
  Chemically Synthesized
QVQLQESGGGLVQAGGSLRLSCAASGNIFQFLEMGWYRQAPGKEREFVGAITNYADSVKGRFTISRDNAKNTVYLQMNSLKPEDTAVYYCAVTQVGPVYLTYWGQGTQVTVSS

SEQ ID NO: 39701 - protein, 122 aa, Artificial Sequence
  Chemically Synthesized
QVQLQESGGGLVQAGGSLRLSCAASGTIFIVYDMGWYRQAPGKERELVATIGFGGITNYADSVKGRFTISRDNAKNTVYLQMNSLKPEDTAVYYCAAGPGYIRSAGAYLLYWGQGTQVTVSS

SEQ ID NO: 39702 - protein, 117 aa, Artificial Sequence
  Chemically Synthesized
QVQLQESGGGLVQAGGSLRLSCAASGYISANVYMGWYRQAPGKERELVASIDSGGITYYADSVKGRFTISRDNAKNTVYLQMNSLKPEDTAVYYCAVTSDQVSVLYWGQGTQVTVSS

SEQ ID NO: 39703 - protein, 118 aa, Artificial Sequence
  Chemically Synthesized
QVQLQESGGGLVQAGGSLRLSCAASGYISRDGLMGWYRQAPGKERELVATINGGSSTYYADSVKGRFTISRDNAKNTVYLQMNSLKPEDTAVYYCAVYHVPYPNHVYWGQGTQVTVSS

SEQ ID NO: 39704 - protein, 120 aa, Artificial Sequence
  Chemically Synthesized
QVQLQESGGGLVQAGGSLRLSCAASGTIFAPRRMGWYRQAPGKEREFVAAIGVLVPYADSVKGRFTISRDNAKNTVYLQMNSLKPEDTAVYYCAAGFYNYYTTYTYYDYWGQGTQVTVSS

SEQ ID NO: 39705 - protein, 118 aa, Artificial Sequence
  Chemically Synthesized
QVQLQESGGGLVQAGGSLRLSCAASGTISNLLVMGWYRQAPGKEREFVAAIGRGGNTNYADSVKGRFTISRDNAKNTVYLQMNSLKPEDTAVYYCAAISLTPVGHYYWGQGTQVTVSS

SEQ ID NO: 39706 - protein, 118 aa, Artificial Sequence
  Chemically Synthesized
QVQLQESGGGLVQAGGSLRLSCAASGTIFGVIFMGWYRQAPGKERELVAAIGYGTSTYYADSVKGRFTISRDNAKNTVYLQMNSLKPEDTAVYYCAVTSWGGDRHYYWGQGTQVTVSS

SEQ ID NO: 39707 - protein, 120 aa, Artificial Sequence
  Chemically Synthesized
QVQLQESGGGLVQAGGSLRLSCAASGIFLTLTMGWYRQAPGKEREFVAAISYGASTYYADSVKGRFTISRDNAKNTVYLQMNSLKPEDTAVYYCAALSVSSLITLTLIYWGQGTQVTVSS

SEQ ID NO: 39708 - protein, 118 aa, Artificial Sequence
  Chemically Synthesized
QVQLQESGGGLVQAGGSLRLSCAASGTISWASNMGWYRQAPGKEREFVAGIDIGSSTYYADSVKGRFTISRDNAKNTVYLQMNSLKPEDTAVYYCAARWNVDSPHQYWGQGTQVTVSS

SEQ ID NO: 39709 - protein, 113 aa, Artificial Sequence
  Chemically Synthesized
QVQLQESGGGLVQAGGSLRLSCAASGSISSVVMGWYRQAPGKERELVAGIAVGASTNYADSVKGRFTISRDNAKNTVYLQMNSLKPEDTAVYYCAALPFAYYWGQGTQVTVSS

SEQ ID NO: 39710 - protein, 122 aa, Artificial Sequence
  Chemically Synthesized
QVQLQESGGGLVQAGGSLRLSCAASGYISFDQVMGWYRQAPGKERELVAAISAGGSTYYADSVKGRFTISRDNAKNTVYLQMNSLKPEDTAVYYCAVTNALVGDDAAYHAYWGQGTQVTVSS

SEQ ID NO: 39711 - protein, 126 aa, Artificial Sequence
  Chemically Synthesized
QVQLQESGGGLVQAGGSLRLSCAASGNIFYGYAMGWYRQAPGKERELVAGINYGASTYYADSVKGRFTISRDNAKNTVYLQMNSLKPEDTAVYYCAVWAPTDRDYWADGNSRLNYWGQGTQVTVSS

SEQ ID NO: 39712 - protein, 121 aa, Artificial Sequence
  Chemically Synthesized
QVQLQESGGGLVQAGGSLRLSCAASGNIFDREAMGWYRQAPGKERELVASIASVVLPYADSVKGRFTISRDNAKNTVYLQMNSLKPEDTAVYYCAVDIIAFKRRYYYHYYWGQGTQVTVSS

SEQ ID NO: 39713 - protein, 126 aa, Artificial Sequence
  Chemically Synthesized
QVQLQESGGGLVQAGGSLRLSCAASGSIFWRRSMGWYRQAPGKEREFVAAIGDGGITNYADSVKGRFTISRDNAKNTVYLQMNSLKPEDTAVYYCAVVDTDFSPRDGVQYRILHYWGQGTQVTVSS

SEQ ID NO: 39714 - protein, 122 aa, Artificial Sequence
  Chemically Synthesized
QVQLQESGGGLVQAGGSLRLSCAASGNIFRPSGMGWYRQAPGKEREFVAGIGRGGNTNYADSVKGRFTISRDNAKNTVYLQMNSLKPEDTAVYYCAAIVRRPDERASTFHYWGQGTQVTVSS

SEQ ID NO: 39715 - protein, 126 aa, Artificial Sequence
  Chemically Synthesized
QVQLQESGGGLVQAGGSLRLSCAASGNISGHVYMGWYRQAPGKERELVAAIATGATTNYADSVKGRFTISRDNAKNTVYLQMNSLKPEDTAVYYCAASYDSSVTRKTSYNGGYTYWGQGTQVTVSS

SEQ ID NO: 39716 - protein, 122 aa, Artificial Sequence
  Chemically Synthesized
QVQLQESGGGLVQAGGSLRLSCAASGTISYSDHMGWYRQAPGKEREFVATITDGASTNYADSVKGRFTISRDNAKNTVYLQMNSLKPEDTAVYYCAAYYLGGYEVTWWLQYWGQGTQVTVSS

SEQ ID NO: 39717 - protein, 114 aa, Artificial Sequence
  Chemically Synthesized
QVQLQESGGGLVQAGGSLRLSCAASGSISAPGHMGWYRQAPGKERELVAAISSGTNTYYADSVKGRFTISRDNAKNTVYLQMNSLKPEDTAVYYCAVGFLQNYWGQGTQVTVSS

SEQ ID NO: 39718 - protein, 117 aa, Artificial Sequence
  Chemically Synthesized
QVQLQESGGGLVQAGGSLRLSCAASGTISGRQMGWYRQAPGKERELVAGINEGTTTYYADSVKGRFTISRDNAKNTVYLQMNSLKPEDTAVYYCAVDDADPPYHDYWGQGTQVTVSS

SEQ ID NO: 39719 - protein, 122 aa, Artificial Sequence
  Chemically Synthesized
QVQLQESGGGLVQAGGSLRLSCAASGSISAGYGMGWYRQAPGKEREFVAGINDGGITYYADSVKGRFTISRDNAKNTVYLQMNSLKPEDTAVYYCAAIDTGRRRGRGWFWYWGQGTQVTVSS

SEQ ID NO: 39720 - protein, 119 aa, Artificial Sequence
  Chemically Synthesized
QVQLQESGGGLVQAGGSLRLSCAASGTISKPYVMGWYRQAPGKEREFVAAINVNGSTTNYADSVKGRFTISRDNAKNTVYLQMNSLKPEDTAVYYCAAAGYSLYDHYYWGQGTQVTVSS

SEQ ID NO: 39721 - protein, 125 aa, Artificial Sequence
  Chemically Synthesized
QVQLQESGGGLVQAGGSLRLSCAASGTISYNQLMGWYRQAPGKERELVATIGIGALPYADSVKGRFTISRDNAKNTVYLQMNSLKPEDTAVYYCAADAQDLFYISLRDPRGHSYWGQGTQVTVSS

SEQ ID NO: 39722 - protein, 116 aa, Artificial Sequence
  Chemically Synthesized
QVQLQESGGGLVQAGGSLRLSCAASGYIFADTSMGWYRQAPGKERELVAGIASVVLPYADSVKGRFTISRDNAKNTVYLQMNSLKPEDTAVYYCAVLGISVCCIYWGQGTQVTVSS

SEQ ID NO: 39723 - protein, 118 aa, Artificial Sequence
  Chemically Synthesized
QVQLQESGGGLVQAGGSLRLSCAASGYISYPRVMGWYRQAPGKEREFVAGIGSGSNTYYADSVKGRFTISRDNAKNTVYLQMNSLKPEDTAVYYCAVARWTSARFRYWGQGTQVTVSS

SEQ ID NO: 39724 - protein, 117 aa, Artificial Sequence
  Chemically Synthesized
QVQLQESGGGLVQAGGSLRLSCAASGNIFGDVYMGWYRQAPGKEREFVPVLVWVVVPYADSVKGRFTISRDNAKNTVYLQMNSLKPEDTAVYYCAVDPYWRHVHFYWGQGTQVTVSS

SEQ ID NO: 39725 - protein, 118 aa, Artificial Sequence
  Chemically Synthesized
QVQLQESGGGLVQAGGSLRLSCAASGNISNLLVMGWYRQAPGKEREFVAAIAGGASTNYADSVKGRFTISRDNAKNTVYLQMNSLKPEDTAVYYCAAITVPTPYHYYWGQGTQVTVSS

SEQ ID NO: 39726 - protein, 121 aa, Artificial Sequence
  Chemically Synthesized
QVQLQESGGGLVQAGGSLRLSCAASGNISPSVYMGWYRQAPGKEREFVAGINAGTITNYADSVKGRFTISRDNAKNTVYLQMNSLKPEDTAVYYCAAQDAVTLVILCLLYWGQGTQVTVSS

SEQ ID NO: 39727 - protein, 117 aa, Artificial Sequence
  Chemically Synthesized
QVQLQESGGGLVQAGGSLRLSCAASGNISWPVYMGWYRQAPGKEREFVASIDRGAITNYADSVKGRFTISRDNAKNTVYLQMNSLKPEDTAVYYCAVYDLYSVLIYWGQGTQVTVSS

SEQ ID NO: 39728 - protein, 118 aa, Artificial Sequence
  Chemically Synthesized
QVQLQESGGGLVQAGGSLRLSCAASGTIFAYAAMGWYRQAPGKEREFVAAISGGATTNYADSVKGRFTISRDNAKNTVYLQMNSLKPEDTAVYYCAAAWDDGGYHYYWGQGTQVTVSS

SEQ ID NO: 39729 - protein, 118 aa, Artificial Sequence
  Chemically Synthesized
QVQLQESGGGLVQAGGSLRLSCAASGYIFGVQYMGWYRQAPGKEREFVAAISTGGSTNYADSVKGRFTISRDNAKNTVYLQMNSLKPEDTAVYYCAVWSSLKHYHTYWGQGTQVTVSS

SEQ ID NO: 39730 - protein, 118 aa, Artificial Sequence
  Chemically Synthesized
QVQLQESGGGLVQAGGSLRLSCAASGTISSDDYMGWYRQAPGKEREFVAAIGLGGITNYADSVKGRFTISRDNAKNTVYLQMNSLKPEDTAVYYCAVVTHYRGYHGYWGQGTQVTVSS

SEQ ID NO: 39731 - protein, 122 aa, Artificial Sequence
  Chemically Synthesized
QVQLQESGGGLVQAGGSLRLSCAASGNIFRGDHMGWYRQAPGKEREFVATIDTGTSTNYADSVKGRFTISRDNAKNTVYLQMNSLKPEDTAVYYCAAGIGDVGGPAWYHPYWGQGTQVTVSS

SEQ ID NO: 39732 - protein, 118 aa, Artificial Sequence
  Chemically Synthesized
QVQLQESGGGLVQAGGSLRLSCAASGSISDGGPMGWYRQAPGKEREFVAGIGYGTITNYADSVKGRFTISRDNAKNTVYLQMNSLKPEDTAVYYCAALVRFHGIHAYWGQGTQVTVSS

SEQ ID NO: 39733 - protein, 122 aa, Artificial Sequence
  Chemically Synthesized
QVQLQESGGGLVQAGGSLRLSCAASGTISTLTYMGWYRQAPGKEREFVAGIAYGSTTNYADSVKGRFTISRDNAKNTVYLQMNSLKPEDTAVYYCAATDATNYLHYDAHAYWGQGTQVTVSS

SEQ ID NO: 39734 - protein, 122 aa, Artificial Sequence
  Chemically Synthesized
QVQLQESGGGLVQAGGSLRLSCAASGTISSSANMGWYRQAPGKEREFVATIDGGSTTYYADSVKGRFTISRDNAKNTVYLQMNSLKPEDTAVYYCAADPGGEAGRARVHKYWGQGTQVTVSS

SEQ ID NO: 39735 - protein, 116 aa, Artificial Sequence
  Chemically Synthesized
QVQLQESGGGLVQAGGSLRLSCAASGSISDYTAMGWYRQAPGKEREFVAGIGKGGTTNYADSVKGRFTISRDNAKNTVYLQMNSLKPEDTAVYYCAVVDRRHHGYWGQGTQVTVSS

SEQ ID NO: 39736 - protein, 126 aa, Artificial Sequence
  Chemically Synthesized
QVQLQESGGGLVQAGGSLRLSCAASGYIFAYDPMGWYRQAPGKEREFVAAINTGTITYYADSVKGRFTISRDNAKNTVYLQMNSLKPEDTAVYYCAAGYGRTYVTWGDRGTPLSYWGQGTQVTVSS

SEQ ID NO: 39737 - protein, 117 aa, Artificial Sequence
  Chemically Synthesized
QVQLQESGGGLVQAGGSLRLSCAASGSIFRRYYMGWYRQAPGKERELLPLLVVVVVPYADSVKGRFTISRDNAKNTVYLQMNSLKPEDTAVYYCAASYTDNTYHVYWGQGTQVTVSS

SEQ ID NO: 39738 - protein, 116 aa, Artificial Sequence
  Chemically Synthesized
QVQLQESGGGLVQAGGSLRLSCAASGYISYLGMGWYRQAPGKEREFVASIVLVLLPYADSVKGRFTISRDNAKNTVYLQMNSLKPEDTAVYYCAVDITDYSAFTYWGQGTQVTVSS

SEQ ID NO: 39739 - protein, 118 aa, Artificial Sequence
  Chemically Synthesized
QVQLQESGGGLVQAGGSLRLSCAASGTISSNTIMGWYRQAPGKEREFVAAISGGSTTNYADSVKGRFTISRDNAKNTVYLQMNSLKPEDTAVYYCAVVGYRTGYHYYWGQGTQVTVSS

SEQ ID NO: 39740 - protein, 121 aa, Artificial Sequence
  Chemically Synthesized
QVQLQESGGGLVQAGGSLRLSCAASGNISVDDGMGWYRQAPGKERELVAAIDQGTTTYYADSVKGRFTISRDNAKNTVYLQMNSLKPEDTAVYYCAVRSRSTLTWVTTFYWGQGTQVTVSS

SEQ ID NO: 39741 - protein, 118 aa, Artificial Sequence
  Chemically Synthesized
QVQLQESGGGLVQAGGSLRLSCAASGTISTGPIMGWYRQAPGKEREFVAGISDGTITNYADSVKGRFTISRDNAKNTVYLQMNSLKPEDTAVYYCAAYTVQRGYHGYWGQGTQVTVSS

SEQ ID NO: 39742 - protein, 118 aa, Artificial Sequence
  Chemically Synthesized
QVQLQESGGGLVQAGGSLRLSCAASGSISARYVMGWYRQAPGKEREFVAAIDHGAITNYADSVKGRFTISRDNAKNTVYLQMNSLKPEDTAVYYCAAIVLGGSLHYYWGQGTQVTVSS

SEQ ID NO: 39743 - protein, 118 aa, Artificial Sequence
  Chemically Synthesized
QVQLQESGGGLVQAGGSLRLSCAASGTIFDHSYMGWYRQAPGKEREFVAAIAYGSSTNYADSVKGRFTISRDNAKNTVYLQMNSLKPEDTAVYYCAVILYNYGYYYYWGQGTQVTVSS

SEQ ID NO: 39744 - protein, 121 aa, Artificial Sequence
  Chemically Synthesized
QVQLQESGGGLVQAGGSLRLSCAASGTIFQGYAMGWYRQAPGKERELVASIGYGTTTYYADSVKGRFTISRDNAKNTVYLQMNSLKPEDTAVYYCAVDGSTLTGRRVSLYWGQGTQVTVSS

SEQ ID NO: 39745 - protein, 118 aa, Artificial Sequence
  Chemically Synthesized
QVQLQESGGGLVQAGGSLRLSCAASGNISHGYTMGWYRQAPGKEREFVAGIGLGGSTNYADSVKGRFTISRDNAKNTVYLQMNSLKPEDTAVYYCAVVVRDRLYLYYWGQGTQVTVSS

SEQ ID NO: 39746 - protein, 118 aa, Artificial Sequence
  Chemically Synthesized
QVQLQESGGGLVQAGGSLRLSCAASGTIFRDTRMGWYRQAPGKERELVAAIDGGANTYYADSVKGRFTISRDNAKNTVYLQMNSLKPEDTAVYYCAVVRSTPPYHYYWGQGTQVTVSS

SEQ ID NO: 39747 - protein, 118 aa, Artificial Sequence
  Chemically Synthesized
QVQLQESGGGLVQAGGSLRLSCAASGTIFRPQVMGWYRQAPGKEREFVAAIGLGGSTNYADSVKGRFTISRDNAKNTVYLQMNSLKPEDTAVYYCAAWTIKRDYHLYWGQGTQVTVSS

SEQ ID NO: 39748 - protein, 121 aa, Artificial Sequence
  Chemically Synthesized
QVQLQESGGGLVQAGGSLRLSCAASGNISTGQYMGWYRQAPGKERELVATIGYGGITYADSVKGRFTISRDNAKNTVYLQMNSLKPEDTAVYYCAVHYDVSDRVTRDFVYWGQGTQVTVSS

SEQ ID NO: 39749 - protein, 125 aa, Artificial Sequence
  Chemically Synthesized
QVQLQESGGGLVQAGGSLRLSCAASGSISEDSIMGWYRQAPGKERELVAAIGQGGSTYYADSVKGRFTISRDNAKNTVYLQMNSLKPEDTAVYYCAAYRRDQEYQYLIYDYVHYWGQGTQVTVSS

SEQ ID NO: 39750 - protein, 118 aa, Artificial Sequence
  Chemically Synthesized
QVQLQESGGGLVQAGGSLRLSCAASGTISPILYMGWYRQAPGKEREFVAAITPGGTTYYADSVKGRFTISRDNAKNTVYLQMNSLKPEDTAVYYCAVGTSYTGRLVYWGQGTQVTVSS

SEQ ID NO: 39751 - protein, 126 aa, Artificial Sequence
  Chemically Synthesized
QVQLQESGGGLVQAGGSLRLSCAASGNISDLYWMGWYRQAPGKEREFVATINGGATTYYADSVKGRFTISRDNAKNTVYLQMNSLKPEDTAVYYCAVDGVLVDAAAFATLDGYDYWGQGTQVTVSS

SEQ ID NO: 39752 - protein, 118 aa, Artificial Sequence
  Chemically Synthesized
QVQLQESGGGLVQAGGSLRLSCAASGTIFRDTGMGWYRQAPGKEREFVASITAGAITNYADSVKGRFTISRDNAKNTVYLQMNSLKPEDTAVYYCAADVTSFVYLDYWGQGTQVTVSS

SEQ ID NO: 39753 - protein, 118 aa, Artificial Sequence
  Chemically Synthesized
QVQLQESGGGLVQAGGSLRLSCAASGTISPYSDMGWYRQAPGKEREFVAAITGGANTYYADSVKGRFTISRDNAKNTVYLQMNSLKPEDTAVYYCAALYYRTIDFGYWGQGTQVTVSS

SEQ ID NO: 39754 - protein, 121 aa, Artificial Sequence
  Chemically Synthesized
QVQLQESGGGLVQAGGSLRLSCAASGSIFHDPDMGWYRQAPGKERELVAAINYGGSTNYADSVKGRFTISRDNAKNTVYLQMNSLKPEDTAVYYCAVRRQIFSTTVKTLYWGQGTQVTVSS

SEQ ID NO: 39755 - protein, 122 aa, Artificial Sequence
  Chemically Synthesized
QVQLQESGGGLVQAGGSLRLSCAASGYIFWTRIMGWYRQAPGKEREFVAGITWGGITYYADSVKGRFTISRDNAKNTVYLQMNSLKPEDTAVYYCAAQRRGTEYLDSFFHYWGQGTQVTVSS

SEQ ID NO: 39756 - protein, 118 aa, Artificial Sequence
  Chemically Synthesized
QVQLQESGGGLVQAGGSLRLSCAASGTIFLTDRMGWYRQAPGKERELVATINYGASTNYADSVKGRFTISRDNAKNTVYLQMNSLKPEDTAVYYCAVYGTIVPYFPYWGQGTQVTVSS

SEQ ID NO: 39757 - protein, 111 aa, Artificial Sequence
  Chemically Synthesized
QVQLQESGGGLVQAGGSLRLSCAASGNISVTQPMGWYRQAPGKERELVAAINYGANTNYADSVKGRFTISRDNAKNTVYLQMNSLKPEDTAVYYCASLNYWGQGTQVTVSS

SEQ ID NO: 39758 - protein, 126 aa, Artificial Sequence
  Chemically Synthesized
QVQLQESGGGLVQAGGSLRLSCAASGNIFDDTGMGWYRQAPGKEREFVATIAVGTTTNYADSVKGRFTISRDNAKNTVYLQMNSLKPEDTAVYYCAADLYSGLHYDSNYWTDLDYWGQGTQVTVSS

SEQ ID NO: 39759 - protein, 122 aa, Artificial Sequence
  Chemically Synthesized
QVQLQESGGGLVQAGGSLRLSCAASGSISDGYYMGWYRQAPGKEREFVAGIDRGGNTYYADSVKGRFTISRDNAKNTVYLQMNSLKPEDTAVYYCAATRDYRTRTEKPYQYWGQGTQVTVSS

SEQ ID NO: 39760 - protein, 122 aa, Artificial Sequence
  Chemically Synthesized
QVQLQESGGGLVQAGGSLRLSCAASGNISYAYQMGWYRQAPGKEREFVASIAAGASTYYADSVKGRFTISRDNAKNTVYLQMNSLKPEDTAVYYCAVLNQYPFLFFVGYGYWGQGTQVTVSS

SEQ ID NO: 39761 - protein, 122 aa, Artificial Sequence
  Chemically Synthesized
QVQLQESGGGLVQAGGSLRLSCAASGTIFLAPPMGWYRQAPGKERELVATITKGGNTYYADSVKGRFTISRDNAKNTVYLQMNSLKPEDTAVYYCAVKDYGGVDDAYDHDYWGQGTQVTVSS

SEQ ID NO: 39762 - protein, 117 aa, Artificial Sequence
  Chemically Synthesized
QVQLQESGGGLVQAGGSLRLSCAASGYIFSDIGMGWYRQAPGKEREFVATIVVGYYLYADSVKGRFTISRDNAKNTVYLQMNSLKPEDTAVYYCAASRQIVYGYDYWGQGTQVTVSS

SEQ ID NO: 39763 - protein, 118 aa, Artificial Sequence
  Chemically Synthesized
QVQLQESGGGLVQAGGSLRLSCAASGYISPLIGMGWYRQAPGKERELVASINFGASTNYADSVKGRFTISRDNAKNTVYLQMNSLKPEDTAVYYCAAGTGLHRVHYYWGQGTQVTVSS

SEQ ID NO: 39764 - protein, 122 aa, Artificial Sequence
  Chemically Synthesized
QVQLQESGGGLVQAGGSLRLSCAASGNIFAYSVMGWYRQAPGKEREFVAGISYGGTTYYADSVKGRFTISRDNAKNTVYLQMNSLKPEDTAVYYCAVYSARYAQYRGIHQYWGQGTQVTVSS

SEQ ID NO: 39765 - protein, 122 aa, Artificial Sequence
  Chemically Synthesized
QVQLQESGGGLVQAGGSLRLSCAASGYIFVYFYMGWYRQAPGKERELVATISLGGTTNYADSVKGRFTISRDNAKNTVYLQMNSLKPEDTAVYYCAAKRRDLRRWSYGLDYWGQGTQVTVSS

SEQ ID NO: 39766 - protein, 117 aa, Artificial Sequence
  Chemically Synthesized
QVQLQESGGGLVQAGGSLRLSCAASGSISSDHPMGWYRQAPGKEREFVATIAYGGITYADSVKGRFTISRDNAKNTVYLQMNSLKPEDTAVYYCAAARGTDYWFYYWGQGTQVTVSS

SEQ ID NO: 39767 - protein, 118 aa, Artificial Sequence
  Chemically Synthesized
QVQLQESGGGLVQAGGSLRLSCAASGYIFDTVNMGWYRQAPGKERELVATIGYGAITYYADSVKGRFTISRDNAKNTVYLQMNSLKPEDTAVYYCAVHKRYPARHVYWGQGTQVTVSS

SEQ ID NO: 39768 - protein, 125 aa, Artificial Sequence
  Chemically Synthesized
QVQLQESGGGLVQAGGSLRLSCAASGYIFQLRYMGWYRQAPGKERELVAGINSGATTNYADSVKGRFTISRDNAKNTVYLQMNSLKPEDTAVYYCAVDWIRYRQEGRTWSDAYYWGQGTQVTVSS

SEQ ID NO: 39769 - protein, 122 aa, Artificial Sequence
  Chemically Synthesized
QVQLQESGGGLVQAGGSLRLSCAASGTISDYPRMGWYRQAPGKERELVAAIGGGGITNYADSVKGRFTISRDNAKNTVYLQMNSLKPEDTAVYYCAVVIESIQDNGWYHAYWGQGTQVTVSS

SEQ ID NO: 39770 - protein, 117 aa, Artificial Sequence
  Chemically Synthesized
QVQLQESGGGLVQAGGSLRLSCAASGNIFRPYMGWYRQAPGKEREFVAGIGGGANTYYADSVKGRFTISRDNAKNTVYLQMNSLKPEDTAVYYCAVALYLRPRLRYWGQGTQVTVSS

SEQ ID NO: 39771 - protein, 125 aa, Artificial Sequence
  Chemically Synthesized
QVQLQESGGGLVQAGGSLRLSCAASGNIFVSYRMGWYRQAPGKERELVPLLVTVVLPYADSVKGRFTISRDNAKNTVYLQMNSLKPEDTAVYYCAAYAWGNDLLATWSGSSFGYWGQGTQVTVSS

SEQ ID NO: 39772 - protein, 121 aa, Artificial Sequence
  Chemically Synthesized
QVQLQESGGGLVQAGGSLRLSCAASGSISRGYRMGWYRQAPGKEREFVAGISYGGIPYADSVKGRFTISRDNAKNTVYLQMNSLKPEDTAVYYCAVDTSYVYYRWEYHAYWGQGTQVTVSS

SEQ ID NO: 39773 - protein, 126 aa, Artificial Sequence
  Chemically Synthesized
QVQLQESGGGLVQAGGSLRLSCAASGNISYGEVMGWYRQAPGKERELVAGINRGSITNYADSVKGRFTISRDNAKNTVYLQMNSLKPEDTAVYYCAVIRRYRRDRYYSQYPQHYYWGQGTQVTVSS

SEQ ID NO: 39774 - protein, 116 aa, Artificial Sequence
  Chemically Synthesized
QVQLQESGGGLVQAGGSLRLSCAASGNIFPSAMGWYRQAPGKEREFVAAIDPGTITYYADSVKGRFTISRDNAKNTVYLQMNSLKPEDTAVYYCAYTGLDAYHDYWGQGTQVTVSS

SEQ ID NO: 39775 - protein, 118 aa, Artificial Sequence
  Chemically Synthesized
QVQLQESGGGLVQAGGSLRLSCAASGSIFTYYIMGWYRQAPGKEREFVATITAGTNTYYADSVKGRFTISRDNAKNTVYLQMNSLKPEDTAVYYCAVNWLYWLAHQYWGQGTQVTVSS

SEQ ID NO: 39776 - protein, 122 aa, Artificial Sequence
  Chemically Synthesized
QVQLQESGGGLVQAGGSLRLSCAASGLYFCCLQMGWYRQAPGKERELVAAINDGAITNYADSVKGRFTISRDNAKNTVYLQMNSLKPEDTAVYYCAALYLKTWYIASWLAYWGQGTQVTVSS

SEQ ID NO: 39777 - protein, 122 aa, Artificial Sequence
  Chemically Synthesized
QVQLQESGGGLVQAGGSLRLSCAASGSISTTPMGWYRQAPGKEREFVATIGDGGTSTNYADSVKGRFTISRDNAKNTVYLQMNSLKPEDTAVYYCAVIDRGEKFPIVALGYWGQGTQVTVSS

SEQ ID NO: 39778 - protein, 117 aa, Artificial Sequence
  Chemically Synthesized
QVQLQESGGGLVQAGGSLRLSCAASGSIMGWYRQAPGKERELVATIGAGTNTYYADSVKGRFTISRDNAKNTVYLQMNSLKPEDTAVYYCAAEYVSGDYGPVRLTYWGQGTQVTVSS

SEQ ID NO: 39779 - protein, 118 aa, Artificial Sequence
  Chemically Synthesized
QVQLQESGGGLVQAGGSLRLSCAASGNISHAYGMGWYRQAPGKERELVAAINYGAITNYADSVKGRFTISRDNAKNTVYLQMNSLKPEDTAVYYCAVTWWKYLLHNYWGQGTQVTVSS

SEQ ID NO: 39780 - protein, 117 aa, Artificial Sequence
  Chemically Synthesized
QVQLQESGGGLVQAGGSLRLSCAASGNIFPIDYMGWYRQAPGKERELVAGINRGGITNYADSVKGRFTISRDNAKNTVYLQMNSLKPEDTAVYYCAVRDLVTSFIYWGQGTQVTVSS

SEQ ID NO: 39781 - protein, 121 aa, Artificial Sequence
  Chemically Synthesized
QVQLQESGGGLVQAGGSLRLSCAASGSISDWLVMGWYRQAPGKEREFVASIGPGAITNYADSVKGRFTISRDNAKNTVYLQMNSLKPEDTAVYYCAVERQSYPYRYSVFYWGQGTQVTVSS

SEQ ID NO: 39782 - protein, 119 aa, Artificial Sequence
  Chemically Synthesized
QVQLQESGGGLVQAGGSLRLSCAASGNIFGYLYMGWYRQAPGKERELVASIGAGSNTNYADSVKGRFTISRDNAKNTVYLQMNSLKPEDTAVYYCAAWAWDDYYTHPYWGQGTQVTVSS

SEQ ID NO: 39783 - protein, 117 aa, Artificial Sequence
  Chemically Synthesized
QVQLQESGGGLVQAGGSLRLSCAASGYISTSYTMGWYRQAPGKERELVAGIAYGGTTYYADSVKGRFTISRDNAKNTVYLQMNSLKPEDTAVYYCAAFTDVDHSIYWGQGTQVTVSS

SEQ ID NO: 39784 - protein, 117 aa, Artificial Sequence
  Chemically Synthesized
QVQLQESGGGLVQAGGSLRLSCAASGYIFYAQRMGWYRQAPGKERELVASIGTGGTKYADSVKGRFTISRDNAKNTVYLQMNSLKPEDTAVYYCAAANYSNHNHIYWGQGTQVTVSS

SEQ ID NO: 39785 - protein, 126 aa, Artificial Sequence
  Chemically Synthesized
QVQLQESGGGLVQAGGSLRLSCAASGSIFPIYYMGWYRQAPGKERELVATIDWGTITYYADSVKGRFTISRDNAKNTVYLQMNSLKPEDTAVYYCAVNSPTFQDGVSDTATRHYYWGQGTQVTVSS

SEQ ID NO: 39786 - protein, 115 aa, Artificial Sequence
  Chemically Synthesized
QVQLQESGGGLVQAGGSLRLSCAASGTIFDQVDMGWYRQAPGKEREFVAGINYGGTTNYADSVKGRFTISRDNAKNTVYLQMNSLKPEDTAVYYCAAIRSTTFYWGQGTQVTVSS

SEQ ID NO: 39787 - protein, 115 aa, Artificial Sequence
  Chemically Synthesized
QVQLQESGGGLVQAGGSLRLSCAASGTISRIKVMGWYRQAPGKEREFVAGIDFGGTTYYADSVKGRFTISRDNAKNTVYLQMNSLKPEDTAVYYCAVAPIGHYYWGQGTQVTVSS

SEQ ID NO: 39788 - protein, 118 aa, Artificial Sequence
  Chemically Synthesized
QVQLQESGGGLVQAGGSLRLSCAASGNISFYGRMGWYRQAPGKERELVAAINYGGTTYYADSVKGRFTISRDNAKNTVYLQMNSLKPEDTAVYYCAAVRVLPVYHYYWGQGTQVTVSS

SEQ ID NO: 39789 - protein, 126 aa, Artificial Sequence
  Chemically Synthesized
QVQLQESGGGLVQAGGSLRLSCAASGNISRLHVMGWYRQAPGKERELVASIDGGGNTYYADSVKGRFTISRDNAKNTVYLQMNSLKPEDTAVYYCAVLVSRAPPVNNDDSQQYQYWGQGTQVTVSS

SEQ ID NO: 39790 - protein, 126 aa, Artificial Sequence
  Chemically Synthesized
QVQLQESGGGLVQAGGSLRLSCAASGSIFQYDTMGWYRQAPGKERELVASIGPGTNTYYADSVKGRFTISRDNAKNTVYLQMNSLKPEDTAVYYCAAVTDGTPQTYGAVYGFLTYWGQGTQVTVSS

SEQ ID NO: 39791 - protein, 118 aa, Artificial Sequence
  Chemically Synthesized
QVQLQESGGGLVQAGGSLRLSCAASGSISDPLDMGWYRQAPGKERELVASITSGANTNYADSVKGRFTISRDNAKNTVYLQMNSLKPEDTAVYYCAVNNLDGRYFRYWGQGTQVTVSS

SEQ ID NO: 39792 - protein, 118 aa, Artificial Sequence
  Chemically Synthesized
QVQLQESGGGLVQAGGSLRLSCAASGSIFDLHLMGWYRQAPGKEREFVASIAAGGSTYYADSVKGRFTISRDNAKNTVYLQMNSLKPEDTAVYYCAAALYSAAVHPYWGQGTQVTVSS

SEQ ID NO: 39793 - protein, 126 aa, Artificial Sequence
  Chemically Synthesized
QVQLQESGGGLVQAGGSLRLSCAASGNIFRLDDMGWYRQAPGKERELVATIGPGTITYYADSVKGRFTISRDNAKNTVYLQMNSLKPEDTAVYYCAVGAQSYEDPLSRYSPRYDYWGQGTQVTVSS

SEQ ID NO: 39794 - protein, 122 aa, Artificial Sequence
  Chemically Synthesized
QVQLQESGGGLVQAGGSLRLSCAASGSIFSKTDMGWYRQAPGKERELVAAITAGGSTYYADSVKGRFTISRDNAKNTVYLQMNSLKPEDTAVYYCAADIRGRWFRPTVHRYWGQGTQVTVSS

SEQ ID NO: 39795 - protein, 114 aa, Artificial Sequence
  Chemically Synthesized
QVQLQESGGGLVQAGGSLRLSCAASGYFLRRMGWYRQAPGKERELVAGINDGIPYADSVKGRFTISRDNAKNTVYLQMNSLKPEDTAVYYCAVYTANYQDHGYWGQGTQVTVSS

SEQ ID NO: 39796 - protein, 122 aa, Artificial Sequence
  Chemically Synthesized
QVQLQESGGGLVQAGGSLRLSCAASGSISYSGYMGWYRQAPGKEREFVAAIGAGANTYYADSVKGRFTISRDNAKNTVYLQMNSLKPEDTAVYYCAAKGYDRRREYDTFWYWGQGTQVTVSS

SEQ ID NO: 39797 - protein, 117 aa, Artificial Sequence
  Chemically Synthesized
QVQLQESGGGLVQAGGSLRLSCAASGTISYGYLMGWYRQAPGKERELVASIGDVVVPYADSVKGRFTISRDNAKNTVYLQMNSLKPEDTAVYYCAVYTYGYADFYYWGQGTQVTVSS

SEQ ID NO: 39798 - protein, 118 aa, Artificial Sequence
  Chemically Synthesized
QVQLQESGGGLVQAGGSLRLSCAASGNISGYGKMGWYRQAPGKEREFVASIDQGGTTYYADSVKGRFTISRDNAKNTVYLQMNSLKPEDTAVYYCAAEGYTVQSHRYWGQGTQVTVSS

SEQ ID NO: 39799 - protein, 117 aa, Artificial Sequence
  Chemically Synthesized
QVQLQESGGGLVQAGGSLRLSCAASGNISVAYSMGWYRQAPGKERELVATINYGGNTYADSVKGRFTISRDNAKNTVYLQMNSLKPEDTAVYYCAADDGKLPDLTYWGQGTQVTVSS

SEQ ID NO: 39800 - protein, 118 aa, Artificial Sequence
  Chemically Synthesized
QVQLQESGGGLVQAGGSLRLSCAASGYISVVIDMGWYRQAPGKEREFVATIGVGGITNYADSVKGRFTISRDNAKNTVYLQMNSLKPEDTAVYYCAAVSTPWLDLVYWGQGTQVTVSS

SEQ ID NO: 39801 - protein, 118 aa, Artificial Sequence
  Chemically Synthesized
QVQLQESGGGLVQAGGSLRLSCAASGTIFRWDVMGWYRQAPGKERELVATIDGGGITNYADSVKGRFTISRDNAKNTVYLQMNSLKPEDTAVYYCAVPDIDYSYHAYWGQGTQVTVSS

SEQ ID NO: 39802 - protein, 118 aa, Artificial Sequence
  Chemically Synthesized
QVQLQESGGGLVQAGGSLRLSCAASGYIFDPFYMGWYRQAPGKERELVATITLGGTTNYADSVKGRFTISRDNAKNTVYLQMNSLKPEDTAVYYCAVFGQSGIYLPYWGQGTQVTVSS

SEQ ID NO: 39803 - protein, 118 aa, Artificial Sequence
  Chemically Synthesized
QVQLQESGGGLVQAGGSLRLSCAASGNISSSATMGWYRQAPGKERELVASITLGGITNYADSVKGRFTISRDNAKNTVYLQMNSLKPEDTAVYYCAAHWYNVPTYVYWGQGTQVTVSS

SEQ ID NO: 39804 - protein, 122 aa, Artificial Sequence
  Chemically Synthesized
QVQLQESGGGLVQAGGSLRLSCAASGYISSSQVMGWYRQAPGKEREFVAAIGSGTTTNYADSVKGRFTISRDNAKNTVYLQMNSLKPEDTAVYYCAAWDVWDDLDIVAYWYWGQGTQVTVSS

SEQ ID NO: 39805 - protein, 116 aa, Artificial Sequence
  Chemically Synthesized
QVQLQESGGGLVQAGGSLRLSCAASGTIFYYYFMGWYRQAPGKERELVAGIANGVPYADSVKGRFTISRDNAKNTVYLQMNSLKPEDTAVYYCAVLSSATDAYPYWGQGTQVTVSS

SEQ ID NO: 39806 - protein, 118 aa, Artificial Sequence
  Chemically Synthesized
QVQLQESGGGLVQAGGSLRLSCAASGNIFRYQNMGWYRQAPGKERELVASIAVGTNTYYADSVKGRFTISRDNAKNTVYLQMNSLKPEDTAVYYCAVDSYVAYVHGYWGQGTQVTVSS

SEQ ID NO: 39807 - protein, 120 aa, Artificial Sequence
  Chemically Synthesized
QVQLQESGGGLVQAGGSLRLSCAASGSISIGRGMGWYRQAPGKERELVAAIGAGSTYYADSVKGRFTISRDNAKNTVYLQMNSLKPEDTAVYYCAVTYEQPDRSWISHYWGQGTQVTVSS

SEQ ID NO: 39808 - protein, 115 aa, Artificial Sequence
  Chemically Synthesized
QVQLQESGGGLVQAGGSLRLSCAASGTIFAVYDMGWYRQAPGKERELVAVLVKVLLPYADSVKGRFTISRDNAKNTVYLQMNSLKPEDTAVYYCAAYRGSALVYWGQGTQVTVSS

SEQ ID NO: 39809 - protein, 126 aa, Artificial Sequence
  Chemically Synthesized
QVQLQESGGGLVQAGGSLRLSCAASGNISQDPYMGWYRQAPGKERELVASITSGANTYYADSVKGRFTISRDNAKNTVYLQMNSLKPEDTAVYYCAVPYGVLYYRGGGYQADYYYWGQGTQVTVSS

SEQ ID NO: 39810 - protein, 122 aa, Artificial Sequence
  Chemically Synthesized
QVQLQESGGGLVQAGGSLRLSCAASGYIFLSSWMGWYRQAPGKEREFVAGIGTGANTYYADSVKGRFTISRDNAKNTVYLQMNSLKPEDTAVYYCAADTPAYRQWDYLYLYWGQGTQVTVSS

SEQ ID NO: 39811 - protein, 117 aa, Artificial Sequence
  Chemically Synthesized
QVQLQESGGGLVQAGGSLRLSCAASGSISLAGDMGWYRQAPGKEREFVATIANGGITYADSVKGRFTISRDNAKNTVYLQMNSLKPEDTAVYYCAVVPWPTPSYAYWGQGTQVTVSS

SEQ ID NO: 39812 - protein, 122 aa, Artificial Sequence
  Chemically Synthesized
QVQLQESGGGLVQAGGSLRLSCAASGTIFYLYVMGWYRQAPGKERELVAAIAAGANTYYADSVKGRFTISRDNAKNTVYLQMNSLKPEDTAVYYCAAWGYPDGITLTDLVYWGQGTQVTVSS

SEQ ID NO: 39813 - protein, 118 aa, Artificial Sequence
  Chemically Synthesized
QVQLQESGGGLVQAGGSLRLSCAASGNIFALWYMGWYRQAPGKEREFVATIDNGAITYYADSVKGRFTISRDNAKNTVYLQMNSLKPEDTAVYYCAAHSAPYYYFVYWGQGTQVTVSS

SEQ ID NO: 39814 - protein, 125 aa, Artificial Sequence
  Chemically Synthesized
QVQLQESGGGLVQAGGSLRLSCAASGNISVGDWSMGWYRQAPGKEREFVAAIAVGAITYADSVKGRFTISRDNAKNTVYLQMNSLKPEDTAVYYCACCWLRYYCSLRWLDWSFYWGQGTQVTVSS

SEQ ID NO: 39815 - protein, 122 aa, Artificial Sequence
  Chemically Synthesized
QVQLQESGGGLVQAGGSLRLSCAASGTIFDTLSMGWYRQAPGKEREFVATISIGGSTYYADSVKGRFTISRDNAKNTVYLQMNSLKPEDTAVYYCAARYSDQSVADYVHDYWGQGTQVTVSS

SEQ ID NO: 39816 - protein, 126 aa, Artificial Sequence
  Chemically Synthesized
QVQLQESGGGLVQAGGSLRLSCAASGTIFTYPGMGWYRQAPGKERELVASIAPGGNTYYADSVKGRFTISRDNAKNTVYLQMNSLKPEDTAVYYCAVTFSAYYIVSLYYWYLHLYWGQGTQVTVSS

SEQ ID NO: 39817 - protein, 126 aa, Artificial Sequence
  Chemically Synthesized
QVQLQESGGGLVQAGGSLRLSCAASGTIFLDDYMGWYRQAPGKEREFVATIAFGSSTNYADSVKGRFTISRDNAKNTVYLQMNSLKPEDTAVYYCAVDVDHTDQAWYEVYDDHRYWGQGTQVTVSS

SEQ ID NO: 39818 - protein, 117 aa, Artificial Sequence
  Chemically Synthesized
QVQLQESGGGLVQAGGSLRLSCAASGSISNITMGWYRQAPGKERELVAGIAGGATTYYADSVKGRFTISRDNAKNTVYLQMNSLKPEDTAVYYCAVTADGKSGFWYWGQGTQVTVSS

SEQ ID NO: 39819 - protein, 125 aa, Artificial Sequence
  Chemically Synthesized
QVQLQESGGGLVQAGGSLRLSCAASGNISQRVHMGWYRQAPGKERELVAGIDSVVIPYADSVKGRFTISRDNAKNTVYLQMNSLKPEDTAVYYCAVGRLRPEYGPSYPGDPYDYWGQGTQVTVSS

SEQ ID NO: 39820 - protein, 118 aa, Artificial Sequence
  Chemically Synthesized
QVQLQESGGGLVQAGGSLRLSCAASGYIFVDRYMGWYRQAPGKEREFVAGIGFGGTTNYADSVKGRFTISRDNAKNTVYLQMNSLKPEDTAVYYCAVLDDSRGALIYWGQGTQVTVSS

SEQ ID NO: 39821 - protein, 117 aa, Artificial Sequence
  Chemically Synthesized
QVQLQESGGGLVQAGGSLRLSCAASGNIFSIRMGWYRQAPGKERELVAAIGHGGNTYYADSVKGRFTISRDNAKNTVYLQMNSLKPEDTAVYYCAAAYYTSGFHYYWGQGTQVTVSS

SEQ ID NO: 39822 - protein, 118 aa, Artificial Sequence
  Chemically Synthesized
QVQLQESGGGLVQAGGSLRLSCAASGSIFYIVIMGWYRQAPGKERELVAAIGTGTSTYYADSVKGRFTISRDNAKNTVYLQMNSLKPEDTAVYYCAVRSYWARPHDYWGQGTQVTVSS

SEQ ID NO: 39823 - protein, 125 aa, Artificial Sequence
  Chemically Synthesized
QVQLQESGGGLVQAGGSLRLSCAASGTIFYSLMGWYRQAPGKERELVAAIAQGATTYYADSVKGRFTISRDNAKNTVYLQMNSLKPEDTAVYYCAADYYYDLYYQYRVTYQFDYWGQGTQVTVSS

SEQ ID NO: 39824 - protein, 124 aa, Artificial Sequence
  Chemically Synthesized
QVQLQESGGGLVQAGGSLRLSCAASGNISEGVGMGWYRQAPGKERELVATIAGGGITNYADSVKGRFTISRDNAKNTVYLQMNSLKPEDTAVYYCAVVTLRDWYDVTDDRFYYWGQGTQVTVSS

SEQ ID NO: 39825 - protein, 122 aa, Artificial Sequence
  Chemically Synthesized
QVQLQESGGGLVQAGGSLRLSCAASGSIFSYANMGWYRQAPGKEREFVASIDSGTTTNYADSVKGRFTISRDNAKNTVYLQMNSLKPEDTAVYYCAADSRPLSGWPDRFSYWGQGTQVTVSS

SEQ ID NO: 39826 - protein, 115 aa, Artificial Sequence
  Chemically Synthesized
QVQLQESGGGLVQAGGSLRLSCAASGYISSYQSMGWYRQAPGKERELVITPGATTYADSVKGRFTISRDNAKNTVYLQMNSLKPEDTAVYYCAVYYARYKPFFYWGQGTQVTVSS

SEQ ID NO: 39827 - protein, 118 aa, Artificial Sequence
  Chemically Synthesized
QVQLQESGGGLVQAGGSLRLSCAASGNIFNVGQMGWYRQAPGKEREFVAGIDRGATTYYADSVKGRFTISRDNAKNTVYLQMNSLKPEDTAVYYCAVGEYAYHLHVYWGQGTQVTVSS

SEQ ID NO: 39828 - protein, 121 aa, Artificial Sequence
  Chemically Synthesized
QVQLQESGGGLVQAGGSLRLSCAASGSISLDDGMGWYRQAPGKERELVPLLLLVVLPYADSVKGRFTISRDNAKNTVYLQMNSLKPEDTAVYYCAAVKAGEYGLPDDFAYWGQGTQVTVSS

SEQ ID NO: 39829 - protein, 117 aa, Artificial Sequence
  Chemically Synthesized
QVQLQESGGGLVQAGGSLRLSCAASGYIFGLGIMGWYRQAPGKERELVAGISGGGNTYADSVKGRFTISRDNAKNTVYLQMNSLKPEDTAVYYCAADSHYAVNHDYWGQGTQVTVSS

SEQ ID NO: 39830 - protein, 117 aa, Artificial Sequence
  Chemically Synthesized
QVQLQESGGGLVQAGGSLRLSCAASGTIFNLASMGWYRQAPGKERELVATINQGGNTYYADSVKGRFTISRDNAKNTVYLQMNSLKPEDTAVYYCALTTLLTSTIYWGQGTQVTVSS

SEQ ID NO: 39831 - protein, 124 aa, Artificial Sequence
  Chemically Synthesized
QVQLQESGGGLVQAGGSLRLSCAASGNIFTAYEMGWYRQAPGKERELVATIAYGTTNYADSVKGRFTISRDNAKNTVYLQMNSLKPEDTAVYYCAVYYFESSLSYSHGLQHGYWGQGTQVTVSS

SEQ ID NO: 39832 - protein, 121 aa, Artificial Sequence
  Chemically Synthesized
QVQLQESGGGLVQAGGSLRLSCAASGYISRYWGMGWYRQAPGKERELVAAITRGAITYYADSVKGRFTISRDNAKNTVYLQMNSLKPEDTAVYYCAVDSLLLVTLLTTFYWGQGTQVTVSS

SEQ ID NO: 39833 - protein, 126 aa, Artificial Sequence
  Chemically Synthesized
QVQLQESGGGLVQAGGSLRLSCAASGTIFYYSPMGWYRQAPGKEREFVASISFGSTTYYADSVKGRFTISRDNAKNTVYLQMNSLKPEDTAVYYCAVLRVGRTYDFARNDTVHTYWGQGTQVTVSS

SEQ ID NO: 39834 - protein, 116 aa, Artificial Sequence
  Chemically Synthesized
QVQLQESGGGLVQAGGSLRLSCAASGNIFYYLGMGWYRQAPGKEREFVALLTVLLPYADSVKGRFTISRDNAKNTVYLQMNSLKPEDTAVYYCAVKPDPQYTHPYWGQGTQVTVSS

SEQ ID NO: 39835 - protein, 116 aa, Artificial Sequence
  Chemically Synthesized
QVQLQESGGGLVQAGGSLRLSCAASGNISSLLMGWYRQAPGKEREFVAAISYGTSTNYADSVKGRFTISRDNAKNTVYLQMNSLKPEDTAVYYCAVNTPDSSSMYWGQGTQVTVSS

SEQ ID NO: 39836 - protein, 118 aa, Artificial Sequence
  Chemically Synthesized
QVQLQESGGGLVQAGGSLRLSCAASGTIFRDDVMGWYRQAPGKERELVASITEGGSTNYADSVKGRFTISRDNAKNTVYLQMNSLKPEDTAVYYCAAERDPSFLHDYWGQGTQVTVSS

SEQ ID NO: 39837 - protein, 117 aa, Artificial Sequence
  Chemically Synthesized
QVQLQESGGGLVQAGGSLRLSCAASGNFCSSVMGWYRQAPGKERELVAAINDGATTNYADSVKGRFTISRDNAKNTVYLQMNSLKPEDTAVYYCAAESYASGAHDYWGQGTQVTVSS

SEQ ID NO: 39838 - protein, 121 aa, Artificial Sequence
  Chemically Synthesized
QVQLQESGGGLVQAGGSLRLSCAASGTILLTLMGWYRQAPGKERELVAAIDRGGSTYYADSVKGRFTISRDNAKNTVYLQMNSLKPEDTAVYYCAALSANWGKPSQEHDYWGQGTQVTVSS

SEQ ID NO: 39839 - protein, 126 aa, Artificial Sequence
  Chemically Synthesized
QVQLQESGGGLVQAGGSLRLSCAASGSISDTDLMGWYRQAPGKERELVASISTGATTYYADSVKGRFTISRDNAKNTVYLQMNSLKPEDTAVYYCAARRNRHDYDYAVDYVDLGYWGQGTQVTVSS

SEQ ID NO: 39840 - protein, 120 aa, Artificial Sequence
  Chemically Synthesized
QVQLQESGGGLVQAGGSLRLSCAASGTIFSLTMGWYRQAPGKERELVAGIDIGASTNYADSVKGRFTISRDNAKNTVYLQMNSLKPEDTAVYYCAAWDWVPPYDGYHWYWGQGTQVTVSS

SEQ ID NO: 39841 - protein, 119 aa, Artificial Sequence
  Chemically Synthesized
QVQLQESGGGLVQAGGSLRLSCAASGNIFPYVYMGWYRQAPGKERELVAAINGGGATTNYADSVKGRFTISRDNAKNTVYLQMNSLKPEDTAVYYCAVTQVSDLLHGYWGQGTQVTVSS

SEQ ID NO: 39842 - protein, 125 aa, Artificial Sequence
  Chemically Synthesized
QVQLQESGGGLVQAGGSLRLSCAASGYIFREYLMGWYRQAPGKERELVAAMVRVVLPYADSVKGRFTISRDNAKNTVYLQMNSLKPEDTAVYYCAVGDSVSAHPYGGGYTTYDYWGQGTQVTVSS

SEQ ID NO: 39843 - protein, 119 aa, Artificial Sequence
  Chemically Synthesized
QVQLQESGGGLVQAGGSLRLSCAASGTIFAILVMGWYRQAPGKEREFVASIATGGTTTNYADSVKGRFTISRDNAKNTVYLQMNSLKPEDTAVYYCAAPRWALRRHGYWGQGTQVTVSS

SEQ ID NO: 39844 - protein, 121 aa, Artificial Sequence
  Chemically Synthesized
QVQLQESGGGLVQAGGSLRLSCAASGNIFWYDYMGWYRQAPGKERELVATIDRGGTTNYADSVKGRFTISRDNAKNTVYLQMNSLKPEDTAVYYCAVYDYPSTLGTLVMYWGQGTQVTVSS

SEQ ID NO: 39845 - protein, 122 aa, Artificial Sequence
  Chemically Synthesized
QVQLQESGGGLVQAGGSLRLSCAASGNISRYHEMGWYRQAPGKERELVATIGSGSNTNYADSVKGRFTISRDNAKNTVYLQMNSLKPEDTAVYYCAAQRGYYGADLWDFSYWGQGTQVTVSS

SEQ ID NO: 39846 - protein, 117 aa, Artificial Sequence
  Chemically Synthesized
QVQLQESGGGLVQAGGSLRLSCAASGTIFYSTDMGWYRQAPGKEREFVAGIGLVVLPYADSVKGRFTISRDNAKNTVYLQMNSLKPEDTAVYYCAAYFARRDSFEYWGQGTQVTVSS

SEQ ID NO: 39847 - protein, 117 aa, Artificial Sequence
  Chemically Synthesized
QVQLQESGGGLVQAGGSLRLSCAASGYIFPSTQMGWYRQAPGKEREFVAAIALGSSTYYADSVKGRFTISRDNAKNTVYLQMNSLKPEDTAVYYCAVTYDVRAHYYWGQGTQVTVSS

SEQ ID NO: 39848 - protein, 126 aa, Artificial Sequence
  Chemically Synthesized
QVQLQESGGGLVQAGGSLRLSCAASGYISPRGSMGWYRQAPGKERELVASIARGGSTNYADSVKGRFTISRDNAKNTVYLQMNSLKPEDTAVYYCAVWGRFTWSYNKWYGRDFPYWGQGTQVTVSS

SEQ ID NO: 39849 - protein, 126 aa, Artificial Sequence
  Chemically Synthesized
QVQLQESGGGLVQAGGSLRLSCAASGTIFDTYTMGWYRQAPGKERELVAAISYGTTTYYADSVKGRFTISRDNAKNTVYLQMNSLKPEDTAVYYCAAWVTDDVVYSDRHSRGLTYWGQGTQVTVSS

SEQ ID NO: 39850 - protein, 118 aa, Artificial Sequence
  Chemically Synthesized
QVQLQESGGGLVQAGGSLRLSCAASGYIFSTYTMGWYRQAPGKEREFVAGIGFGTITYYADSVKGRFTISRDNAKNTVYLQMNSLKPEDTAVYYCAAFRRYSGRYYYWGQGTQVTVSS

SEQ ID NO: 39851 - protein, 121 aa, Artificial Sequence
  Chemically Synthesized
QVQLQESGGGLVQAGGSLRLSCAASGTISNLYGMGWYRQAPGKERELVAGIDSVVVPYADSVKGRFTISRDNAKNTVYLQMNSLKPEDTAVYYCAVDAYYGGISVPDHGYWGQGTQVTVSS

SEQ ID NO: 39852 - protein, 122 aa, Artificial Sequence
  Chemically Synthesized
QVQLQESGGGLVQAGGSLRLSCAASGTISGRPIMGWYRQAPGKERELVAAIAAGANTYYADSVKGRFTISRDNAKNTVYLQMNSLKPEDTAVYYCAVGTLTVGLYQVGHGYWGQGTQVTVSS

SEQ ID NO: 39853 - protein, 117 aa, Artificial Sequence
  Chemically Synthesized
QVQLQESGGGLVQAGGSLRLSCAASGTISSMVMGWYRQAPGKEREFVAAINLGGNTNYADSVKGRFTISRDNAKNTVYLQMNSLKPEDTAVYYCAAPSTARPDYVYWGQGTQVTVSS

SEQ ID NO: 39854 - protein, 117 aa, Artificial Sequence
  Chemically Synthesized
QVQLQESGGGLVQAGGSLRLSCAASGYFSADSMGWYRQAPGKERELVATIAVGTTTYYADSVKGRFTISRDNAKNTVYLQMNSLKPEDTAVYYCAANYDYAHSYPYWGQGTQVTVSS

SEQ ID NO: 39855 - protein, 118 aa, Artificial Sequence
  Chemically Synthesized
QVQLQESGGGLVQAGGSLRLSCAASGTISTYGVMGWYRQAPGKEREFVAAIDWGSSTNYADSVKGRFTISRDNAKNTVYLQMNSLKPEDTAVYYCAARYHPIDAHRYWGQGTQVTVSS

SEQ ID NO: 39856 - protein, 127 aa, Artificial Sequence
  Chemically Synthesized
QVQLQESGGGLVQAGGSLRLSCAASGTIFRPPFFMGWYRQAPGKEREFVAGISQGTNTYYADSVKGRFTISRDNAKNTVYLQMNSLKPEDTAVYYCAVLNIVTLTCTLTVGVTYAYWGQGTQVTVSS

SEQ ID NO: 39857 - protein, 121 aa, Artificial Sequence
  Chemically Synthesized
QVQLQESGGGLVQAGGSLRLSCAASGYISSRWMGWYRQAPGKEREFVAAIDDGTNTNYADSVKGRFTISRDNAKNTVYLQMNSLKPEDTAVYYCAVDSLIETTGGYTLVYWGQGTQVTVSS

SEQ ID NO: 39858 - protein, 120 aa, Artificial Sequence
  Chemically Synthesized
QVQLQESGGGLVQAGGSLRLSCAASGNIFYRYVMGWYRQAPGKEREFVAAISTGTSTYYADSVKGRFTISRDNAKNTVYLQMNSLKPEDTAVYYCAVYVVSYYGITHQYWGQGTQVTVSS

SEQ ID NO: 39859 - protein, 127 aa, Artificial Sequence
  Chemically Synthesized
QVQLQESGGGLVQAGGSLRLSCAASGSIFSRKYMGWYRQAPGKEREFVAGISSGGITNYADSVKGRFTISRDNAKNTVYLQMNSLKPEDTAVYYCAAYVDGYDTRPKKGVIRGLAYWGQGTQVTVSS

SEQ ID NO: 39860 - protein, 118 aa, Artificial Sequence
  Chemically Synthesized
QVQLQESGGGLVQAGGSLRLSCAASGNISARLVMGWYRQAPGKERELVASINGGAITYYADSVKGRFTISRDNAKNTVYLQMNSLKPEDTAVYYCAARPYTLYLHRYWGQGTQVTVSS

SEQ ID NO: 39861 - protein, 118 aa, Artificial Sequence
  Chemically Synthesized
QVQLQESGGGLVQAGGSLRLSCAASGSISPWVPMGWYRQAPGKEREFVAAIDDGGTTNYADSVKGRFTISRDNAKNTVYLQMNSLKPEDTAVYYCAAGYGSRTALPYWGQGTQVTVSS

SEQ ID NO: 39862 - protein, 122 aa, Artificial Sequence
  Chemically Synthesized
QVQLQESGGGLVQAGGSLRLSCAASGNISIRDKMGWYRQAPGKERELVAAIDTGATTNYADSVKGRFTISRDNAKNTVYLQMNSLKPEDTAVYYCAVTIGFIGYDDKLLQYWGQGTQVTVSS

SEQ ID NO: 39863 - protein, 118 aa, Artificial Sequence
  Chemically Synthesized
QVQLQESGGGLVQAGGSLRLSCAASGYIFYTRPMGWYRQAPGKEREFVAAISSGGNTYYADSVKGRFTISRDNAKNTVYLQMNSLKPEDTAVYYCAVYVYLATSLRYWGQGTQVTVSS

SEQ ID NO: 39864 - protein, 123 aa, Artificial Sequence
  Chemically Synthesized
QVQLQESGGGLVQAGGSLRLSCAASGYIFPRVSMGWYRQAPGKERELVAAIGDGGTTYYADSVKGRFTISRDNAKNTVYLQMNSLKPEDTAVYYCAVDYVYPLSNSWVWYRYWGQGTQVTVSS

SEQ ID NO: 39865 - protein, 118 aa, Artificial Sequence
  Chemically Synthesized
QVQLQESGGGLVQAGGSLRLSCAASGSISKTDHMGWYRQAPGKEREFVATIAEGGTTNYADSVKGRFTISRDNAKNTVYLQMNSLKPEDTAVYYCAVELYPPSYHGYWGQGTQVTVSS

SEQ ID NO: 39866 - protein, 122 aa, Artificial Sequence
  Chemically Synthesized
QVQLQESGGGLVQAGGSLRLSCAASGTISWDYSMGWYRQAPGKEREFVATIAYGASTNYADSVKGRFTISRDNAKNTVYLQMNSLKPEDTAVYYCAVTSPWVWSQPDLHFYWGQGTQVTVSS

SEQ ID NO: 39867 - protein, 126 aa, Artificial Sequence
  Chemically Synthesized
QVQLQESGGGLVQAGGSLRLSCAASGYIFVYDYMGWYRQAPGKEREFVAAISAGTTTYYADSVKGRFTISRDNAKNTVYLQMNSLKPEDTAVYYCAVYGYLLYPGRALNASGHSYWGQGTQVTVSS

SEQ ID NO: 39868 - protein, 121 aa, Artificial Sequence
  Chemically Synthesized
QVQLQESGGGLVQAGGSLRLSCAASGSISRYWVMGWYRQAPGKERELVASINYGASTNYADSVKGRFTISRDNAKNTVYLQMNSLKPEDTAVYYCAVDVDHTLSLLTTMYWGQGTQVTVSS

SEQ ID NO: 39869 - protein, 115 aa, Artificial Sequence
  Chemically Synthesized
QVQLQESGGGLVQAGGSLRLSCAASGTISPYTYMGWYRQAPGKERELVATIGDGTTTYYADSVKGRFTISRDNAKNTVYLQMNSLKPEDTAVYYCAPDPYDLHYWGQGTQVTVSS

SEQ ID NO: 39870 - protein, 122 aa, Artificial Sequence
  Chemically Synthesized
QVQLQESGGGLVQAGGSLRLSCAASGSIFYGWWMGWYRQAPGKERELVATISSGSSTYYADSVKGRFTISRDNAKNTVYLQMNSLKPEDTAVYYCAVFGWVGIRYDIRHFYWGQGTQVTVSS

SEQ ID NO: 39871 - protein, 118 aa, Artificial Sequence
  Chemically Synthesized
QVQLQESGGGLVQAGGSLRLSCAASGTIFRTYQMGWYRQAPGKEREFVAAIDTGSITNYADSVKGRFTISRDNAKNTVYLQMNSLKPEDTAVYYCAVGRITPRPHAYWGQGTQVTVSS

SEQ ID NO: 39872 - protein, 130 aa, Artificial Sequence
  Chemically Synthesized
QVQLQESGGGLVQAGGSLRLSCAASGYIFEYVIMGWYRQAPGKERELVAGIATGTTTYYADSVKGRFTISRDNAKNTVYLQMNSLKPEDTAVYYCAAVGYDTDAGYHEYLQAYQDTFPYWGQGTQVTVSS

SEQ ID NO: 39873 - protein, 118 aa, Artificial Sequence
  Chemically Synthesized
QVQLQESGGGLVQAGGSLRLSCAASGTISYFWTMGWYRQAPGKERELVATIAGGATTYYADSVKGRFTISRDNAKNTVYLQMNSLKPEDTAVYYCAVYILRYLRHVYWGQGTQVTVSS

SEQ ID NO: 39874 - protein, 126 aa, Artificial Sequence
  Chemically Synthesized
QVQLQESGGGLVQAGGSLRLSCAASGTIFSQPWMGWYRQAPGKEREFVAAINSGANTNYADSVKGRFTISRDNAKNTVYLQMNSLKPEDTAVYYCAAWPYHPVQGELYYYGALVYWGQGTQVTVSS

SEQ ID NO: 39875 - protein, 118 aa, Artificial Sequence
  Chemically Synthesized
QVQLQESGGGLVQAGGSLRLSCAASGSIFRKDAMGWYRQAPGKERELVASIAYGTSTNYADSVKGRFTISRDNAKNTVYLQMNSLKPEDTAVYYCAADADTDLELYYWGQGTQVTVSS

SEQ ID NO: 39876 - protein, 118 aa, Artificial Sequence
  Chemically Synthesized
QVQLQESGGGLVQAGGSLRLSCAASGTIFYLSQMGWYRQAPGKERELVAGIGWGGSTNYADSVKGRFTISRDNAKNTVYLQMNSLKPEDTAVYYCAAVGWYYYAYYYWGQGTQVTVSS

SEQ ID NO: 39877 - protein, 122 aa, Artificial Sequence
  Chemically Synthesized
QVQLQESGGGLVQAGGSLRLSCAASGSIFSLVGMGWYRQAPGKERELVAAIGGGANTNYADSVKGRFTISRDNAKNTVYLQMNSLKPEDTAVYYCAAYYWYSDSSGEPHDYWGQGTQVTVSS

SEQ ID NO: 39878 - protein, 112 aa, Artificial Sequence
  Chemically Synthesized
QVQLQESGGGLVQAGGSLRLSCAASGTISRGGVMGWYRQAPGKEREFVATINIGAITYYADSVKGRFTISRDNAKNTVYLQMNSLKPEDTAVYYCATRVIYWGQGTQVTVSS

SEQ ID NO: 39879 - protein, 118 aa, Artificial Sequence
  Chemically Synthesized
QVQLQESGGGLVQAGGSLRLSCAASGSISSWLIMGWYRQAPGKEREFVATIDDGTITNYADSVKGRFTISRDNAKNTVYLQMNSLKPEDTAVYYCAAWLYYAPRHDYWGQGTQVTVSS

SEQ ID NO: 39880 - protein, 126 aa, Artificial Sequence
  Chemically Synthesized
QVQLQESGGGLVQAGGSLRLSCAASGTIFADAYMGWYRQAPGKERELVAGIGYGATTNYADSVKGRFTISRDNAKNTVYLQMNSLKPEDTAVYYCAVGQYYGAIVFNRYFDDHSYWGQGTQVTVSS

SEQ ID NO: 39881 - protein, 118 aa, Artificial Sequence
  Chemically Synthesized
QVQLQESGGGLVQAGGSLRLSCAASGTIFPYASMGWYRQAPGKEREFVAAITGGGITYYADSVKGRFTISRDNAKNTVYLQMNSLKPEDTAVYYCAAYDTDYTAYYYWGQGTQVTVSS

SEQ ID NO: 39882 - protein, 118 aa, Artificial Sequence
  Chemically Synthesized
QVQLQESGGGLVQAGGSLRLSCAASGNISYTFYMGWYRQAPGKEREFVAGITRGGITNYADSVKGRFTISRDNAKNTVYLQMNSLKPEDTAVYYCAVDQRLGSHHAYWGQGTQVTVSS

SEQ ID NO: 39883 - protein, 119 aa, Artificial Sequence
  Chemically Synthesized
QVQLQESGGGLVQAGGSLRLSCAASGYISNTYVIMGWYRQAPGKERELVASIDGGGSTYYADSVKGRFTISRDNAKNTVYLQMNSLKPEDTAVYYCAAYFDLSSDYIYWGQGTQVTVSS

SEQ ID NO: 39884 - protein, 123 aa, Artificial Sequence
  Chemically Synthesized
QVQLQESGGGLVQAGGSLRLSCAASGTIFAFRLMGWYRQAPGKEREFVAGIDHGASTNYADSVKGRFTISRDNAKNTVYLQMNSLKPEDTAVYYCAAYPGFVYRTYVGYLTYWGQGTQVTVSS

SEQ ID NO: 39885 - protein, 122 aa, Artificial Sequence
  Chemically Synthesized
QVQLQESGGGLVQAGGSLRLSCAASGSISYTYEMGWYRQAPGKEREFVASIGAGGSTNYADSVKGRFTISRDNAKNTVYLQMNSLKPEDTAVYYCAADYNDFSKGAQFHDYWGQGTQVTVSS

SEQ ID NO: 39886 - protein, 118 aa, Artificial Sequence
  Chemically Synthesized
QVQLQESGGGLVQAGGSLRLSCAASGSISLRDYMGWYRQAPGKERELVATIAYGATTNYADSVKGRFTISRDNAKNTVYLQMNSLKPEDTAVYYCAAPYDAYYRYDYWGQGTQVTVSS

SEQ ID NO: 39887 - protein, 118 aa, Artificial Sequence
  Chemically Synthesized
QVQLQESGGGLVQAGGSLRLSCAASGTISPSTIMGWYRQAPGKEREFVAAIDLGGNTNYADSVKGRFTISRDNAKNTVYLQMNSLKPEDTAVYYCAAWTKVGGRLHYWGQGTQVTVSS

SEQ ID NO: 39888 - protein, 126 aa, Artificial Sequence
  Chemically Synthesized
QVQLQESGGGLVQAGGSLRLSCAASGTISWYGDMGWYRQAPGKERELVATISGGANTNYADSVKGRFTISRDNAKNTVYLQMNSLKPEDTAVYYCAAGRSSLGAIYRGGSDLYDYWGQGTQVTVSS

SEQ ID NO: 39889 - protein, 118 aa, Artificial Sequence
  Chemically Synthesized
QVQLQESGGGLVQAGGSLRLSCAASGTISTLYAMGWYRQAPGKEREFVAAIDPGSNTYYADSVKGRFTISRDNAKNTVYLQMNSLKPEDTAVYYCAAGQSDGIGHYYWGQGTQVTVSS

SEQ ID NO: 39890 - protein, 120 aa, Artificial Sequence
  Chemically Synthesized
QVQLQESGGGLVQAGGSLRLSCAASGSIFAHETMGWYRQAPGKERELVASIDDGANTYYADSVKGRFTISRDNAKNTVYLQMNSLKPEDTAVYYCAAEDTVTTYYYHRYWGQGTQVTVSS

SEQ ID NO: 39891 - protein, 122 aa, Artificial Sequence
  Chemically Synthesized
QVQLQESGGGLVQAGGSLRLSCAASGSIFITYDMGWYRQAPGKERELVASIDEGSTTNYADSVKGRFTISRDNAKNTVYLQMNSLKPEDTAVYYCAVYTYPYQGPDPDHYYWGQGTQVTVSS

SEQ ID NO: 39892 - protein, 118 aa, Artificial Sequence
  Chemically Synthesized
QVQLQESGGGLVQAGGSLRLSCAASGTIFTIYYMGWYRQAPGKERELVAGIGTGSITNYADSVKGRFTISRDNAKNTVYLQMNSLKPEDTAVYYCAVYYLSRYWYQYWGQGTQVTVSS

SEQ ID NO: 39893 - protein, 118 aa, Artificial Sequence
  Chemically Synthesized
QVQLQESGGGLVQAGGSLRLSCAASGTISLFLLMGWYRQAPGKERELVAAIDTGSNTYYADSVKGRFTISRDNAKNTVYLQMNSLKPEDTAVYYCAAYTYFRFGFAYWGQGTQVTVSS

SEQ ID NO: 39894 - protein, 118 aa, Artificial Sequence
  Chemically Synthesized
QVQLQESGGGLVQAGGSLRLSCAASGNISQFRLMGWYRQAPGKERELVAAIDYGSNTYYADSVKGRFTISRDNAKNTVYLQMNSLKPEDTAVYYCAAYRLYLYWLLYWGQGTQVTVSS

SEQ ID NO: 39895 - protein, 109 aa, Artificial Sequence
  Chemically Synthesized
QVQLQESGGGLVQAGGSLRLSCAASGTISDSTYMGWYRQAPGKERELVATIGFGSTTNYADSVKGRFTISRDNAKNTVYLQMNSLKPEDTAVYYCAIYWGQGTQVTVSS

SEQ ID NO: 39896 - protein, 122 aa, Artificial Sequence
  Chemically Synthesized
QVQLQESGGGLVQAGGSLRLSCAASGNISTLAAMGWYRQAPGKEREFVAGIGTGSSTYYADSVKGRFTISRDNAKNTVYLQMNSLKPEDTAVYYCAALGNGLYHGFAYYDYWGQGTQVTVSS

SEQ ID NO: 39897 - protein, 118 aa, Artificial Sequence
  Chemically Synthesized
QVQLQESGGGLVQAGGSLRLSCAASGNISFLWYMGWYRQAPGKERELVAGIDGGTSTNYADSVKGRFTISRDNAKNTVYLQMNSLKPEDTAVYYCAVYLYDRYWYVYWGQGTQVTVSS

SEQ ID NO: 39898 - protein, 126 aa, Artificial Sequence
  Chemically Synthesized
QVQLQESGGGLVQAGGSLRLSCAASGNIFQSIYMGWYRQAPGKERELVAAINGGSNTNYADSVKGRFTISRDNAKNTVYLQMNSLKPEDTAVYYCAVWRYVDRLRYPGDSFRYPYWGQGTQVTVSS

SEQ ID NO: 39899 - protein, 118 aa, Artificial Sequence
  Chemically Synthesized
QVQLQESGGGLVQAGGSLRLSCAASGSISIIILMGWYRQAPGKERELVASIDAGASTYYADSVKGRFTISRDNAKNTVYLQMNSLKPEDTAVYYCAAYYLTDRWYDYWGQGTQVTVSS

SEQ ID NO: 39900 - protein, 118 aa, Artificial Sequence
  Chemically Synthesized
QVQLQESGGGLVQAGGSLRLSCAASGSISYDRIMGWYRQAPGKEREFVAGIDEGSITYYADSVKGRFTISRDNAKNTVYLQMNSLKPEDTAVYYCAAFEFADTHHDYWGQGTQVTVSS

SEQ ID NO: 39901 - protein, 122 aa, Artificial Sequence
  Chemically Synthesized
QVQLQESGGGLVQAGGSLRLSCAASGNISDWSIMGWYRQAPGKEREFVAGITAGTTTNYADSVKGRFTISRDNAKNTVYLQMNSLKPEDTAVYYCAAYAARLQSPRWYHRYWGQGTQVTVSS

SEQ ID NO: 39902 - protein, 126 aa, Artificial Sequence
  Chemically Synthesized
QVQLQESGGGLVQAGGSLRLSCAASGNISYGYYMGWYRQAPGKEREFVATINYGGNTNYADSVKGRFTISRDNAKNTVYLQMNSLKPEDTAVYYCAVYRRVKAARPYAATYAFGYWGQGTQVTVSS

SEQ ID NO: 39903 - protein, 122 aa, Artificial Sequence
  Chemically Synthesized
QVQLQESGGGLVQAGGSLRLSCAASGTIFPYTLMGWYRQAPGKERELVATIDWGSITYYADSVKGRFTISRDNAKNTVYLQMNSLKPEDTAVYYCAAYYFYYWIQGDWLVYWGQGTQVTVSS

SEQ ID NO: 39904 - protein, 118 aa, Artificial Sequence
  Chemically Synthesized
QVQLQESGGGLVQAGGSLRLSCAASGSISLYLLMGWYRQAPGKEREFVAAIASGGNTYYADSVKGRFTISRDNAKNTVYLQMNSLKPEDTAVYYCAAYSYFYGGFYYWGQGTQVTVSS

SEQ ID NO: 39905 - protein, 122 aa, Artificial Sequence
  Chemically Synthesized
QVQLQESGGGLVQAGGSLRLSCAASGNIFAYYYMGWYRQAPGKEREFVATIGWGSTTYYADSVKGRFTISRDNAKNTVYLQMNSLKPEDTAVYYCAATGTSWGLWRGIYPYWGQGTQVTVSS

SEQ ID NO: 39906 - protein, 121 aa, Artificial Sequence
  Chemically Synthesized
QVQLQESGGGLVQAGGSLRLSCAASGTISDTFYMGWYRQAPGKERELVASINYGSSTNYADSVKGRFTISRDNAKNTVYLQMNSLKPEDTAVYYCAALPYDWVTTTAHVYWGQGTQVTVSS

SEQ ID NO: 39907 - protein, 118 aa, Artificial Sequence
  Chemically Synthesized
QVQLQESGGGLVQAGGSLRLSCAASGYISGAIFMGWYRQAPGKERELVAGIDYGANTYYADSVKGRFTISRDNAKNTVYLQMNSLKPEDTAVYYCAVYYWDKYVYVYWGQGTQVTVSS

SEQ ID NO: 39908 - protein, 118 aa, Artificial Sequence
  Chemically Synthesized
QVQLQESGGGLVQAGGSLRLSCAASGSISFAYVMGWYRQAPGKERELVAGITWGSSTYYADSVKGRFTISRDNAKNTVYLQMNSLKPEDTAVYYCAVRWGYTGYYAYWGQGTQVTVSS

SEQ ID NO: 39909 - protein, 118 aa, Artificial Sequence
  Chemically Synthesized
QVQLQESGGGLVQAGGSLRLSCAASGYIFDYEWMGWYRQAPGKEREFVAGIAIGSSTYYADSVKGRFTISRDNAKNTVYLQMNSLKPEDTAVYYCAAGDLYTGAHDYWGQGTQVTVSS

SEQ ID NO: 39910 - protein, 118 aa, Artificial Sequence
  Chemically Synthesized
QVQLQESGGGLVQAGGSLRLSCAASGTIFDNPSMGWYRQAPGKEREFVATITFGSNTYYADSVKGRFTISRDNAKNTVYLQMNSLKPEDTAVYYCAVVGYYGVHLTYWGQGTQVTVSS

SEQ ID NO: 39911 - protein, 118 aa, Artificial Sequence
  Chemically Synthesized
QVQLQESGGGLVQAGGSLRLSCAASGSISPSSTMGWYRQAPGKERELVASIGIGGTTYYADSVKGRFTISRDNAKNTVYLQMNSLKPEDTAVYYCAARYAYYPFLYYWGQGTQVTVSS

SEQ ID NO: 39912 - protein, 119 aa, Artificial Sequence
  Chemically Synthesized
QVQLQESGGGLVQAGGSLRLSCAASGYISHRGWMGWYRQAPGKEREFVAAISTGATTYYADSVKGRFTISRDNAKNTVYLQMNSLKPEDTAVYYCAAPDYYRDGLFKYWGQGTQVTVSS

SEQ ID NO: 39913 - protein, 118 aa, Artificial Sequence
  Chemically Synthesized
QVQLQESGGGLVQAGGSLRLSCAASGTISYVYLMGWYRQAPGKERELVAAIATGGTTYYADSVKGRFTISRDNAKNTVYLQMNSLKPEDTAVYYCAVYDFKVRWYVYWGQGTQVTVSS

SEQ ID NO: 39914 - protein, 123 aa, Artificial Sequence
  Chemically Synthesized
QVQLQESGGGLVQAGGSLRLSCAASGTISGRLAMGWYRQAPGKEREFVAGITYGTTTYYADSVKGRFTISRDNAKNTVYLQMNSLKPEDTAVYYCAAPYRNAGSYDKGYHNYWGQGTQVTVSS

SEQ ID NO: 39915 - protein, 118 aa, Artificial Sequence
  Chemically Synthesized
QVQLQESGGGLVQAGGSLRLSCAASGSIFRHTTMGWYRQAPGKERELVAAIGSGAITYYADSVKGRFTISRDNAKNTVYLQMNSLKPEDTAVYYCAAVYRRWTGLYYWGQGTQVTVSS

SEQ ID NO: 39916 - protein, 118 aa, Artificial Sequence
  Chemically Synthesized
QVQLQESGGGLVQAGGSLRLSCAASGNISDTFHMGWYRQAPGKERELVAAITGGGTTYYADSVKGRFTISRDNAKNTVYLQMNSLKPEDTAVYYCAAVPYSEPWLIYWGQGTQVTVSS

SEQ ID NO: 39917 - protein, 118 aa, Artificial Sequence
  Chemically Synthesized
QVQLQESGGGLVQAGGSLRLSCAASGNIFRTADMGWYRQAPGKEREFVASISWGTITYYADSVKGRFTISRDNAKNTVYLQMNSLKPEDTAVYYCAVYHYIFYQYGYWGQGTQVTVSS

SEQ ID NO: 39918 - protein, 118 aa, Artificial Sequence
  Chemically Synthesized
QVQLQESGGGLVQAGGSLRLSCAASGSIFGRDNMGWYRQAPGKEREFVAGIAYGTTTYYADSVKGRFTISRDNAKNTVYLQMNSLKPEDTAVYYCAVFGYISVDHDYWGQGTQVTVSS

SEQ ID NO: 39919 - protein, 122 aa, Artificial Sequence
  Chemically Synthesized
QVQLQESGGGLVQAGGSLRLSCAASGNISWRISMGWYRQAPGKERELVAGITYGTNTNYADSVKGRFTISRDNAKNTVYLQMNSLKPEDTAVYYCAAYYFSPNGVRHDYTYWGQGTQVTVSS

SEQ ID NO: 39920 - protein, 118 aa, Artificial Sequence
  Chemically Synthesized
QVQLQESGGGLVQAGGSLRLSCAASGNISTPTFMGWYRQAPGKERELVAGIGWGSTTYYADSVKGRFTISRDNAKNTVYLQMNSLKPEDTAVYYCAAYAVEAKYYPYWGQGTQVTVSS

SEQ ID NO: 39921 - protein, 118 aa, Artificial Sequence
  Chemically Synthesized
QVQLQESGGGLVQAGGSLRLSCAASGTISADYGMGWYRQAPGKERELVAGIAEGGNTYYADSVKGRFTISRDNAKNTVYLQMNSLKPEDTAVYYCAVVYYYAPNHDYWGQGTQVTVSS

SEQ ID NO: 39922 - protein, 118 aa, Artificial Sequence
  Chemically Synthesized
QVQLQESGGGLVQAGGSLRLSCAASGSISSLPVMGWYRQAPGKEREFVAGIAGGTTTNYADSVKGRFTISRDNAKNTVYLQMNSLKPEDTAVYYCAATPSTILAYWYWGQGTQVTVSS

SEQ ID NO: 39923 - protein, 118 aa, Artificial Sequence
  Chemically Synthesized
QVQLQESGGGLVQAGGSLRLSCAASGTIFGYYLMGWYRQAPGKEREFVAGISYGATTNYADSVKGRFTISRDNAKNTVYLQMNSLKPEDTAVYYCAAYHPYNLAFDYWGQGTQVTVSS

SEQ ID NO: 39924 - protein, 122 aa, Artificial Sequence
  Chemically Synthesized
QVQLQESGGGLVQAGGSLRLSCAASGTISTYDEMGWYRQAPGKEREFVAAIDGGTSTYYADSVKGRFTISRDNAKNTVYLQMNSLKPEDTAVYYCAVLHFTWIAYVGYLYYWGQGTQVTVSS

SEQ ID NO: 39925 - protein, 118 aa, Artificial Sequence
  Chemically Synthesized
QVQLQESGGGLVQAGGSLRLSCAASGTISSEHIMGWYRQAPGKEREFVAGISFGGNTYYADSVKGRFTISRDNAKNTVYLQMNSLKPEDTAVYYCAAYWYVVRGHDYWGQGTQVTVSS

SEQ ID NO: 39926 - protein, 121 aa, Artificial Sequence
  Chemically Synthesized
QVQLQESGGGLVQAGGSLRLSCAASGYISDPAGMGWYRQAPGKEREFVAGIGGGSSTYYADSVKGRFTISRDNAKNTVYLQMNSLKPEDTAVYYCAVYGYSYHTRLLLRYWGQGTQVTVSS

SEQ ID NO: 39927 - protein, 122 aa, Artificial Sequence
  Chemically Synthesized
QVQLQESGGGLVQAGGSLRLSCAASGYISGWYFMGWYRQAPGKEREFVAGIGYGSSTNYADSVKGRFTISRDNAKNTVYLQMNSLKPEDTAVYYCAVVRVRKRPDRYYHVYWGQGTQVTVSS

SEQ ID NO: 39928 - protein, 122 aa, Artificial Sequence
  Chemically Synthesized
QVQLQESGGGLVQAGGSLRLSCAASGSIFAYTYMGWYRQAPGKERELVAGIAFGATTNYADSVKGRFTISRDNAKNTVYLQMNSLKPEDTAVYYCAAYVYSDTYGKDAHTYWGQGTQVTVSS

SEQ ID NO: 39929 - protein, 121 aa, Artificial Sequence
  Chemically Synthesized
QVQLQESGGGLVQAGGSLRLSCAASGNISTAYDMGWYRQAPGKEREFVAAIVTVLIPYADSVKGRFTISRDNAKNTVYLQMNSLKPEDTAVYYCAAGYTGYVDTGDGHYYWGQGTQVTVSS

SEQ ID NO: 39930 - protein, 126 aa, Artificial Sequence
  Chemically Synthesized
QVQLQESGGGLVQAGGSLRLSCAASGYIFYYAYMGWYRQAPGKEREFVATISAGATTNYADSVKGRFTISRDNAKNTVYLQMNSLKPEDTAVYYCAAANLVNDDGDYLGVLRYWYWGQGTQVTVSS

SEQ ID NO: 39931 - protein, 121 aa, Artificial Sequence
  Chemically Synthesized
QVQLQESGGGLVQAGGSLRLSCAASGTIFGGDMGWYRQAPGKEREFVASINYGGNTYYADSVKGRFTISRDNAKNTVYLQMNSLKPEDTAVYYCAVGIYYYLPTYYYHYYWGQGTQVTVSS

SEQ ID NO: 39932 - protein, 118 aa, Artificial Sequence
  Chemically Synthesized
QVQLQESGGGLVQAGGSLRLSCAASGTISRDVYMGWYRQAPGKEREFVAGIAYGGTTYYADSVKGRFTISRDNAKNTVYLQMNSLKPEDTAVYYCAVDYYYGGALLYWGQGTQVTVSS

SEQ ID NO: 39933 - protein, 115 aa, Artificial Sequence
  Chemically Synthesized
QVQLQESGGGLVQAGGSLRLSCAASGSIFYYKFMGWYRQAPGKERELVAAITVGASTYYADSVKGRFTISRDNAKNTVYLQMNSLKPEDTAVYYCAGTDYTYGYWGQGTQVTVSS

SEQ ID NO: 39934 - protein, 118 aa, Artificial Sequence
  Chemically Synthesized
QVQLQESGGGLVQAGGSLRLSCAASGTISAPRGMGWYRQAPGKERELVATISRGGITYYADSVKGRFTISRDNAKNTVYLQMNSLKPEDTAVYYCAAFSYGNGRLYYWGQGTQVTVSS

SEQ ID NO: 39935 - protein, 118 aa, Artificial Sequence
  Chemically Synthesized
QVQLQESGGGLVQAGGSLRLSCAASGSIFDPQIMGWYRQAPGKERELVAAITPGSTTNYADSVKGRFTISRDNAKNTVYLQMNSLKPEDTAVYYCAAGTDYPSDFDYWGQGTQVTVSS

SEQ ID NO: 39936 - protein, 122 aa, Artificial Sequence
  Chemically Synthesized
QVQLQESGGGLVQAGGSLRLSCAASGTISAGWVMGWYRQAPGKERELVAGITKGAITNYADSVKGRFTISRDNAKNTVYLQMNSLKPEDTAVYYCAVLSAVWQGDNADHDYWGQGTQVTVSS

SEQ ID NO: 39937 - protein, 117 aa, Artificial Sequence
  Chemically Synthesized
QVQLQESGGGLVQAGGSLRLSCAASGNIFDAWTMGWYRQAPGKEREFVASIGGGANPYADSVKGRFTISRDNAKNTVYLQMNSLKPEDTAVYYCAAYGDVAPYYTYWGQGTQVTVSS

SEQ ID NO: 39938 - protein, 117 aa, Artificial Sequence
  Chemically Synthesized
QVQLQESGGGLVQAGGSLRLSCAASGSIFVRSYMGWYRQAPGKERELVASIAYGATTNYADSVKGRFTISRDNAKNTVYLQMNSLKPEDTAVYYCAVAFDTSSGIYWGQGTQVTVSS

SEQ ID NO: 39939 - protein, 110 aa, Artificial Sequence
  Chemically Synthesized
QVQLQESGGGLVQAGGSLRLSCAASGYISHFDDMGWYRQAPGKEREFVAGIGYGTITNYADSVKGRFTISRDNAKNTVYLQMNSLKPEDTAVYYCAACYWGQGTQVTVSS

SEQ ID NO: 39940 - protein, 118 aa, Artificial Sequence
  Chemically Synthesized
QVQLQESGGGLVQAGGSLRLSCAASGTISYYYQMGWYRQAPGKERELVAAISLGGTTYYADSVKGRFTISRDNAKNTVYLQMNSLKPEDTAVYYCAVEADSEYYLNYWGQGTQVTVSS

SEQ ID NO: 39941 - protein, 118 aa, Artificial Sequence
  Chemically Synthesized
QVQLQESGGGLVQAGGSLRLSCAASGSISRSYSMGWYRQAPGKERELVAAIDYGGSTYYADSVKGRFTISRDNAKNTVYLQMNSLKPEDTAVYYCAVQLGYDFAHPYWGQGTQVTVSS

SEQ ID NO: 39942 - protein, 121 aa, Artificial Sequence
  Chemically Synthesized
QVQLQESGGGLVQAGGSLRLSCAASGYIFYADSMGWYRQAPGKEREFVATIARGGSTYYADSVKGRFTISRDNAKNTVYLQMNSLKPEDTAVYYCAVPSQVAWPATADHYWGQGTQVTVSS

SEQ ID NO: 39943 - protein, 118 aa, Artificial Sequence
  Chemically Synthesized
QVQLQESGGGLVQAGGSLRLSCAASGNIFRSGGMGWYRQAPGKERELVAGISPGTTTYYADSVKGRFTISRDNAKNTVYLQMNSLKPEDTAVYYCAVYGDDDATFPYWGQGTQVTVSS

SEQ ID NO: 39944 - protein, 118 aa, Artificial Sequence
  Chemically Synthesized
QVQLQESGGGLVQAGGSLRLSCAASGYIFLPWNMGWYRQAPGKEREFVASIGYGGTTNYADSVKGRFTISRDNAKNTVYLQMNSLKPEDTAVYYCAVTLDFFQVYRYWGQGTQVTVSS

SEQ ID NO: 39945 - protein, 126 aa, Artificial Sequence
  Chemically Synthesized
QVQLQESGGGLVQAGGSLRLSCAASGTIFAYVYMGWYRQAPGKERELVATINGGAITNYADSVKGRFTISRDNAKNTVYLQMNSLKPEDTAVYYCAANGYPYYPANDTDFPTLSYWGQGTQVTVSS

SEQ ID NO: 39946 - protein, 118 aa, Artificial Sequence
  Chemically Synthesized
QVQLQESGGGLVQAGGSLRLSCAASGYISLAWTMGWYRQAPGKEREFVATIDGGGNTYYADSVKGRFTISRDNAKNTVYLQMNSLKPEDTAVYYCAVNSFRSRYLTYWGQGTQVTVSS

SEQ ID NO: 39947 - protein, 122 aa, Artificial Sequence
  Chemically Synthesized
QVQLQESGGGLVQAGGSLRLSCAASGNISIRNDMGWYRQAPGKERELVAAIAGGTTTNYADSVKGRFTISRDNAKNTVYLQMNSLKPEDTAVYYCAVYDQYPSQYLQRHLYWGQGTQVTVSS

SEQ ID NO: 39948 - protein, 114 aa, Artificial Sequence
  Chemically Synthesized
QVQLQESGGGLVQAGGSLRLSCAASGNIFSLPYMGWYRQAPGKEREFVAGITYGTNTNYADSVKGRFTISRDNAKNTVYLQMNSLKPEDTAVYYCAAASSHAYWGQGTQVTVSS

SEQ ID NO: 39949 - protein, 118 aa, Artificial Sequence
  Chemically Synthesized
QVQLQESGGGLVQAGGSLRLSCAASGYIFQHDAMGWYRQAPGKEREFVATINYGASTNYADSVKGRFTISRDNAKNTVYLQMNSLKPEDTAVYYCAAGNYDALDYGYWGQGTQVTVSS

SEQ ID NO: 39950 - protein, 117 aa, Artificial Sequence
  Chemically Synthesized
QVQLQESGGGLVQAGGSLRLSCAASGSISVDWGMGWYRQAPGKERELVASINRGSNPYADSVKGRFTISRDNAKNTVYLQMNSLKPEDTAVYYCAAEGLATLVYAYWGQGTQVTVSS

SEQ ID NO: 39951 - protein, 122 aa, Artificial Sequence
  Chemically Synthesized
QVQLQESGGGLVQAGGSLRLSCAASGNIFPGVIMGWYRQAPGKEREFVATIASGGNTNYADSVKGRFTISRDNAKNTVYLQMNSLKPEDTAVYYCAAGAYYYPGQYDGHSYWGQGTQVTVSS

SEQ ID NO: 39952 - protein, 126 aa, Artificial Sequence
  Chemically Synthesized
QVQLQESGGGLVQAGGSLRLSCAASGYISVDQNMGWYRQAPGKEREFVATIGYGGTTYYADSVKGRFTISRDNAKNTVYLQMNSLKPEDTAVYYCAVNGTYLLPAVHLVSSWSYYWGQGTQVTVSS

SEQ ID NO: 39953 - protein, 110 aa, Artificial Sequence
  Chemically Synthesized
QVQLQESGGGLVQAGGSLRLSCAASGNIFGSDGMGWYRQAPGKEREFVAAIDYGGSTYYADSVKGRFTISRDNAKNTVYLQMNSLKPEDTAVYYCAVMYWGQGTQVTVSS

SEQ ID NO: 39954 - protein, 118 aa, Artificial Sequence
  Chemically Synthesized
QVQLQESGGGLVQAGGSLRLSCAASGNIFTYRAMGWYRQAPGKERELVATIATGSTTNYADSVKGRFTISRDNAKNTVYLQMNSLKPEDTAVYYCAVTYTYYGTHYYWGQGTQVTVSS

SEQ ID NO: 39955 - protein, 118 aa, Artificial Sequence
  Chemically Synthesized
QVQLQESGGGLVQAGGSLRLSCAASGNIFNKYAMGWYRQAPGKERELVAGISVGASTYYADSVKGRFTISRDNAKNTVYLQMNSLKPEDTAVYYCAAAYYHDRPYVYWGQGTQVTVSS

SEQ ID NO: 39956 - protein, 121 aa, Artificial Sequence
  Chemically Synthesized
QVQLQESGGGLVQAGGSLRLSCAASGSISTYYFMGWYRQAPGKEREFVASIGYGVLPYADSVKGRFTISRDNAKNTVYLQMNSLKPEDTAVYYCAAFKYVDQKREGDHEYWGQGTQVTVSS

SEQ ID NO: 39957 - protein, 117 aa, Artificial Sequence
  Chemically Synthesized
QVQLQESGGGLVQAGGSLRLSCAASGYISGHDMGWYRQAPGKEREFVASIAGGGTTYYADSVKGRFTISRDNAKNTVYLQMNSLKPEDTAVYYCAVWGDVDSYHYYWGQGTQVTVSS

SEQ ID NO: 39958 - protein, 117 aa, Artificial Sequence
  Chemically Synthesized
QVQLQESGGGLVQAGGSLRLSCAASGTISRGDLMGWYRQAPGKEREFVATITYGASTYYADSVKGRFTISRDNAKNTVYLQMNSLKPEDTAVYYCAALPVDRELIYWGQGTQVTVSS

SEQ ID NO: 39959 - protein, 118 aa, Artificial Sequence
  Chemically Synthesized
QVQLQESGGGLVQAGGSLRLSCAASGSISRAGGMGWYRQAPGKERELVAGIAPGGNTNYADSVKGRFTISRDNAKNTVYLQMNSLKPEDTAVYYCAVYYDYIEDPCYWGQGTQVTVSS

SEQ ID NO: 39960 - protein, 118 aa, Artificial Sequence
  Chemically Synthesized
QVQLQESGGGLVQAGGSLRLSCAASGNISARYYMGWYRQAPGKEREFVATITDGTTTNYADSVKGRFTISRDNAKNTVYLQMNSLKPEDTAVYYCAAIQSWGFQLVYWGQGTQVTVSS

SEQ ID NO: 39961 - protein, 117 aa, Artificial Sequence
  Chemically Synthesized
QVQLQESGGGLVQAGGSLRLSCAASGSISGDEPMGWYRQAPGKEREFVASIARGSNTYADSVKGRFTISRDNAKNTVYLQMNSLKPEDTAVYYCAVDYLAYRLLVYWGQGTQVTVSS

SEQ ID NO: 39962 - protein, 122 aa, Artificial Sequence
  Chemically Synthesized
QVQLQESGGGLVQAGGSLRLSCAASGYISILWTMGWYRQAPGKEREFVAGISTGTTTNYADSVKGRFTISRDNAKNTVYLQMNSLKPEDTAVYYCAARHAHPRDDYYPLDYWGQGTQVTVSS

SEQ ID NO: 39963 - protein, 118 aa, Artificial Sequence
  Chemically Synthesized
QVQLQESGGGLVQAGGSLRLSCAASGNISDVFGMGWYRQAPGKERELVAGIAYGASTYYADSVKGRFTISRDNAKNTVYLQMNSLKPEDTAVYYCAVVKITYLTLGYWGQGTQVTVSS

SEQ ID NO: 39964 - protein, 113 aa, Artificial Sequence
  Chemically Synthesized
QVQLQESGGGLVQAGGSLRLSCAASGTISWSQYMGWYRQAPGKERELVAGISEGTNTYYADSVKGRFTISRDNAKNTVYLQMNSLKPEDTAVYYCAGDRYPYWGQGTQVTVSS

SEQ ID NO: 39965 - protein, 118 aa, Artificial Sequence
  Chemically Synthesized
QVQLQESGGGLVQAGGSLRLSCAASGNISPDANMGWYRQAPGKEREFVAAISYGATTYYADSVKGRFTISRDNAKNTVYLQMNSLKPEDTAVYYCAAYDVGRVSHYYWGQGTQVTVSS

SEQ ID NO: 39966 - protein, 118 aa, Artificial Sequence
  Chemically Synthesized
QVQLQESGGGLVQAGGSLRLSCAASGNIFGDYGMGWYRQAPGKEREFVAAITSGTSTYYADSVKGRFTISRDNAKNTVYLQMNSLKPEDTAVYYCAAWLDDVVDHYYWGQGTQVTVSS

SEQ ID NO: 39967 - protein, 124 aa, Artificial Sequence
  Chemically Synthesized
QVQLQESGGGLVQAGGSLRLSCAASGNISSYVIMGWYRQAPGKEREFVAGINEGTITYYADSVKGRFTISRDNAKNTVYLQMNSLKPEDTAVYYCAAEYTYDPVYPFRSQTEYWGQGTQVTVSS

SEQ ID NO: 39968 - protein, 122 aa, Artificial Sequence
  Chemically Synthesized
QVQLQESGGGLVQAGGSLRLSCAASGSISTTNIMGWYRQAPGKERELVATIDDGGNTNYADSVKGRFTISRDNAKNTVYLQMNSLKPEDTAVYYCAATDLGHWDVGYIPYYWGQGTQVTVSS

SEQ ID NO: 39969 - protein, 118 aa, Artificial Sequence
  Chemically Synthesized
QVQLQESGGGLVQAGGSLRLSCAASGSISAYDAMGWYRQAPGKERELVATISNGTTTYYADSVKGRFTISRDNAKNTVYLQMNSLKPEDTAVYYCAAPGHGYVDLPYWGQGTQVTVSS

SEQ ID NO: 39970 - protein, 118 aa, Artificial Sequence
  Chemically Synthesized
QVQLQESGGGLVQAGGSLRLSCAASGYIFRPYLMGWYRQAPGKEREFVASIGFGGNTYYADSVKGRFTISRDNAKNTVYLQMNSLKPEDTAVYYCAVNDSYWPYFKYWGQGTQVTVSS

SEQ ID NO: 39971 - protein, 122 aa, Artificial Sequence
  Chemically Synthesized
QVQLQESGGGLVQAGGSLRLSCAASGSIFYVIAMGWYRQAPGKERELVATITAGTNTYYADSVKGRFTISRDNAKNTVYLQMNSLKPEDTAVYYCAVYALQQDVYDRSHAYWGQGTQVTVSS

SEQ ID NO: 39972 - protein, 118 aa, Artificial Sequence
  Chemically Synthesized
QVQLQESGGGLVQAGGSLRLSCAASGNISWVYWMGWYRQAPGKERELVAGIATGGSTNYADSVKGRFTISRDNAKNTVYLQMNSLKPEDTAVYYCAVVASNGSRFWYWGQGTQVTVSS

SEQ ID NO: 39973 - protein, 120 aa, Artificial Sequence
  Chemically Synthesized
QVQLQESGGGLVQAGGSLRLSCAASGNISDPPFMGWYRQAPGKERELVAGISWGASTYYADSVKGRFTISRDNAKNTVYLQMNSLKPEDTAVYYCAAVTTDFGAYPFAYWGQGTQVTVSS

SEQ ID NO: 39974 - protein, 122 aa, Artificial Sequence
  Chemically Synthesized
QVQLQESGGGLVQAGGSLRLSCAASGYIFDDYGMGWYRQAPGKERELVATINAGANTNYADSVKGRFTISRDNAKNTVYLQMNSLKPEDTAVYYCAVYYGPYYRYLDPYLYWGQGTQVTVSS

SEQ ID NO: 39975 - protein, 117 aa, Artificial Sequence
  Chemically Synthesized
QVQLQESGGGLVQAGGSLRLSCAASGSISGDFMGWYRQAPGKERELVAAISFGATTNYADSVKGRFTISRDNAKNTVYLQMNSLKPEDTAVYYCAARAPPGYYFAYWGQGTQVTVSS

SEQ ID NO: 39976 - protein, 126 aa, Artificial Sequence
  Chemically Synthesized
QVQLQESGGGLVQAGGSLRLSCAASGYIFDHYGMGWYRQAPGKEREFVASISFGSSTNYADSVKGRFTISRDNAKNTVYLQMNSLKPEDTAVYYCAVPPDWDYTVYGYYEYLLDYWGQGTQVTVSS

SEQ ID NO: 39977 - protein, 116 aa, Artificial Sequence
  Chemically Synthesized
QVQLQESGGGLVQAGGSLRLSCAASGTIFSADEMGWYRQAPGKERELVATIGANTYYADSVKGRFTISRDNAKNTVYLQMNSLKPEDTAVYYCAADGYYQRNHGYWGQGTQVTVSS

SEQ ID NO: 39978 - protein, 122 aa, Artificial Sequence
  Chemically Synthesized
QVQLQESGGGLVQAGGSLRLSCAASGSISGINIMGWYRQAPGKEREFVASITEGATTYYADSVKGRFTISRDNAKNTVYLQMNSLKPEDTAVYYCAAWDGGGGWTYPPFYYWGQGTQVTVSS

SEQ ID NO: 39979 - protein, 119 aa, Artificial Sequence
  Chemically Synthesized
QVQLQESGGGLVQAGGSLRLSCAASGYIFKYYTMGWYRQAPGKERELVAAIADGSTTYYADSVKGRFTISRDNAKNTVYLQMNSLKPEDTAVYYCAAWSYDYEYVYAYWGQGTQVTVSS

SEQ ID NO: 39980 - protein, 121 aa, Artificial Sequence
  Chemically Synthesized
QVQLQESGGGLVQAGGSLRLSCAASGYISYRSMGWYRQAPGKEREFVATISRGGSTNYADSVKGRFTISRDNAKNTVYLQMNSLKPEDTAVYYCAAYAGAIQYIGEAHYYWGQGTQVTVSS

SEQ ID NO: 39981 - protein, 122 aa, Artificial Sequence
  Chemically Synthesized
QVQLQESGGGLVQAGGSLRLSCAASGNISYIPYMGWYRQAPGKERELVAGITLGGSTNYADSVKGRFTISRDNAKNTVYLQMNSLKPEDTAVYYCAVYYVDIDGGYWAFVYWGQGTQVTVSS

SEQ ID NO: 39982 - protein, 118 aa, Artificial Sequence
  Chemically Synthesized
QVQLQESGGGLVQAGGSLRLSCAASGTIFYGSAMGWYRQAPGKERELVAGIDAGGSTNYADSVKGRFTISRDNAKNTVYLQMNSLKPEDTAVYYCAAYVYQRLLYRYWGQGTQVTVSS

SEQ ID NO: 39983 - protein, 118 aa, Artificial Sequence
  Chemically Synthesized
QVQLQESGGGLVQAGGSLRLSCAASGYISYTLWMGWYRQAPGKERELVAGISYGTTTYYADSVKGRFTISRDNAKNTVYLQMNSLKPEDTAVYYCAVVDSGSRLYWYWGQGTQVTVSS

SEQ ID NO: 39984 - protein, 122 aa, Artificial Sequence
  Chemically Synthesized
QVQLQESGGGLVQAGGSLRLSCAASGSIFPVNAMGWYRQAPGKERELVAGIARGATTYYADSVKGRFTISRDNAKNTVYLQMNSLKPEDTAVYYCAAVAGYLYSGDKPYQYWGQGTQVTVSS

SEQ ID NO: 39985 - protein, 117 aa, Artificial Sequence
  Chemically Synthesized
QVQLQESGGGLVQAGGSLRLSCAASGYISWEYMGWYRQAPGKEREFVAGITAGASTNYADSVKGRFTISRDNAKNTVYLQMNSLKPEDTAVYYCAVYLWVVRAYQYWGQGTQVTVSS

SEQ ID NO: 39986 - protein, 118 aa, Artificial Sequence
  Chemically Synthesized
QVQLQESGGGLVQAGGSLRLSCAASGNIFGHGVMGWYRQAPGKEREFVAGIGVGGTTYYADSVKGRFTISRDNAKNTVYLQMNSLKPEDTAVYYCAAHSQYSSDHDYWGQGTQVTVSS

SEQ ID NO: 39987 - protein, 126 aa, Artificial Sequence
  Chemically Synthesized
QVQLQESGGGLVQAGGSLRLSCAASGYIFRAYYMGWYRQAPGKEREFVAGISVGSSTNYADSVKGRFTISRDNAKNTVYLQMNSLKPEDTAVYYCAVGYDLLRWVGNEWYDQYYYWGQGTQVTVSS

SEQ ID NO: 39988 - protein, 117 aa, Artificial Sequence
  Chemically Synthesized
QVQLQESGGGLVQAGGSLRLSCAASGSISYWTWMGWYRQAPGKERELVAGITVGTTYYADSVKGRFTISRDNAKNTVYLQMNSLKPEDTAVYYCAAFFSFEYRYWYWGQGTQVTVSS

SEQ ID NO: 39989 - protein, 122 aa, Artificial Sequence
  Chemically Synthesized
QVQLQESGGGLVQAGGSLRLSCAASGTISDVVYMGWYRQAPGKERELVAGIAYGTSTYYADSVKGRFTISRDNAKNTVYLQMNSLKPEDTAVYYCAVFQDTYRPSGGYHWYWGQGTQVTVSS

SEQ ID NO: 39990 - protein, 119 aa, Artificial Sequence
  Chemically Synthesized
QVQLQESGGGLVQAGGSLRLSCAASGYIFTRRGMGWYRQAPGKEREFVAGINPGTNTYYADSVKGRFTISRDNAKNTVYLQMNSLKPEDTAVYYCADYLVYADGILPYWGQGTQVTVSS

SEQ ID NO: 39991 - protein, 118 aa, Artificial Sequence
  Chemically Synthesized
QVQLQESGGGLVQAGGSLRLSCAASGNIFVRWWMGWYRQAPGKERELVAGIDNGGSTYYADSVKGRFTISRDNAKNTVYLQMNSLKPEDTAVYYCAAFLGTTDTYWYWGQGTQVTVSS

SEQ ID NO: 39992 - protein, 122 aa, Artificial Sequence
  Chemically Synthesized
QVQLQESGGGLVQAGGSLRLSCAASGSISRGDNMGWYRQAPGKEREFVASITDGTNTYYADSVKGRFTISRDNAKNTVYLQMNSLKPEDTAVYYCAVGDVYIGGYLPTHYYWGQGTQVTVSS

SEQ ID NO: 39993 - protein, 121 aa, Artificial Sequence
  Chemically Synthesized
QVQLQESGGGLVQAGGSLRLSCAASGSIFLTAPMGWYRQAPGKERELVATIAAGTSTNYADSVKGRFTISRDNAKNTVYLQMNSLKPEDTAVYYCAANDSLTVTTTTSLYWGQGTQVTVSS

SEQ ID NO: 39994 - protein, 118 aa, Artificial Sequence
  Chemically Synthesized
QVQLQESGGGLVQAGGSLRLSCAASGTIFFVWWMGWYRQAPGKEREFVAGIDFGTITYYADSVKGRFTISRDNAKNTVYLQMNSLKPEDTAVYYCAVFGSYLTDHWYWGQGTQVTVSS

SEQ ID NO: 39995 - protein, 122 aa, Artificial Sequence
  Chemically Synthesized
QVQLQESGGGLVQAGGSLRLSCAASGTISDVVYMGWYRQAPGKEREFVAGIDFGANTNYADSVKGRFTISRDNAKNTVYLQMNSLKPEDTAVYYCAVYPSFGDRLTDYHSYWGQGTQVTVSS

SEQ ID NO: 39996 - protein, 117 aa, Artificial Sequence
  Chemically Synthesized
QVQLQESGGGLVQAGGSLRLSCAASGYISYRTVMGWYRQAPGKEREFVAAIGSGSTTYYADSVKGRFTISRDNAKNTVYLQMNSLKPEDTAVYYCAVHGYNVALDYWGQGTQVTVSS

SEQ ID NO: 39997 - protein, 126 aa, Artificial Sequence
  Chemically Synthesized
QVQLQESGGGLVQAGGSLRLSCAASGYIFAYYYMGWYRQAPGKERELVAGIGGGSSTNYADSVKGRFTISRDNAKNTVYLQMNSLKPEDTAVYYCAPWDPKHLRWYSQNYRVLDYWGQGTQVTVSS

SEQ ID NO: 39998 - protein, 122 aa, Artificial Sequence
  Chemically Synthesized
QVQLQESGGGLVQAGGSLRLSCAASGSIFLVHFMGWYRQAPGKERELVAGITHGAITYYADSVKGRFTISRDNAKNTVYLQMNSLKPEDTAVYYCAAGLFNKDVYPLPHWYWGQGTQVTVSS

SEQ ID NO: 39999 - protein, 121 aa, Artificial Sequence
  Chemically Synthesized
QVQLQESGGGLVQAGGSLRLSCAASGYIFTTVMGWYRQAPGKEREFVAGISDGTTTYYADSVKGRFTISRDNAKNTVYLQMNSLKPEDTAVYYCAADHYEGDIIHNGYQYWGQGTQVTVSS

SEQ ID NO: 40000 - protein, 118 aa, Artificial Sequence
  Chemically Synthesized
QVQLQESGGGLVQAGGSLRLSCAASGTIFYGYIMGWYRQAPGKEREFVAGIGVGGSTYYADSVKGRFTISRDNAKNTVYLQMNSLKPEDTAVYYCAVHDYRGGRFDYWGQGTQVTVSS

SEQ ID NO: 40001 - protein, 126 aa, Artificial Sequence
  Chemically Synthesized
QVQLQESGGGLVQAGGSLRLSCAASGYIFSQYTMGWYRQAPGKERELVASIGVGTSTNYADSVKGRFTISRDNAKNTVYLQMNSLKPEDTAVYYCAVGDDYLKGYAYAVKYGYDYWGQGTQVTVSS

SEQ ID NO: 40002 - protein, 118 aa, Artificial Sequence
  Chemically Synthesized
QVQLQESGGGLVQAGGSLRLSCAASGTIFSLYIMGWYRQAPGKEREFVAAIGYGTTTNYADSVKGRFTISRDNAKNTVYLQMNSLKPEDTAVYYCAVSRYGTNLHDYWGQGTQVTVSS

SEQ ID NO: 40003 - protein, 118 aa, Artificial Sequence
  Chemically Synthesized
QVQLQESGGGLVQAGGSLRLSCAASGTIFYGYYMGWYRQAPGKEREFVAAIGYGSSTNYADSVKGRFTISRDNAKNTVYLQMNSLKPEDTAVYYCAVQDYRDVLLPYWGQGTQVTVSS

SEQ ID NO: 40004 - protein, 122 aa, Artificial Sequence
  Chemically Synthesized
QVQLQESGGGLVQAGGSLRLSCAASGTIFYLAYMGWYRQAPGKERELVAGIAQGGNTNYADSVKGRFTISRDNAKNTVYLQMNSLKPEDTAVYYCAVAGFFEIYYIGDLWYWGQGTQVTVSS

SEQ ID NO: 40005 - protein, 121 aa, Artificial Sequence
  Chemically Synthesized
QVQLQESGGGLVQAGGSLRLSCAASGYISGYQGMGWYRQAPGKEREFVAAIDSGASTYYADSVKGRFTISRDNAKNTVYLQMNSLKPEDTAVYYCAAYWRPHQLTNGLIYWGQGTQVTVSS

SEQ ID NO: 40006 - protein, 122 aa, Artificial Sequence
  Chemically Synthesized
QVQLQESGGGLVQAGGSLRLSCAASGYISFIHFMGWYRQAPGKEREFVAGITHGSITYYADSVKGRFTISRDNAKNTVYLQMNSLKPEDTAVYYCAVYYTGRDYYSRDHWYWGQGTQVTVSS

SEQ ID NO: 40007 - protein, 118 aa, Artificial Sequence
  Chemically Synthesized
QVQLQESGGGLVQAGGSLRLSCAASGSISYPADMGWYRQAPGKERELVASITYGCYYLYADSVKGRFTISRDNAKNTVYLQMNSLKPEDTAVYYCAVFWADARSLVYWGQGTQVTVSS

SEQ ID NO: 40008 - protein, 122 aa, Artificial Sequence
  Chemically Synthesized
QVQLQESGGGLVQAGGSLRLSCAASGSIFDVPFMGWYRQAPGKERELVAGISYGGTTYYADSVKGRFTISRDNAKNTVYLQMNSLKPEDTAVYYCAALILDRIRTLPAHWYWGQGTQVTVSS

SEQ ID NO: 40009 - protein, 126 aa, Artificial Sequence
  Chemically Synthesized
QVQLQESGGGLVQAGGSLRLSCAASGTIFFFTNMGWYRQAPGKEREFVAAIDYGASTYYADSVKGRFTISRDNAKNTVYLQMNSLKPEDTAVYYCAARTYLNWDDYIIEQQSHGYWGQGTQVTVSS

SEQ ID NO: 40010 - protein, 118 aa, Artificial Sequence
  Chemically Synthesized
QVQLQESGGGLVQAGGSLRLSCAASGTISSVLRMGWYRQAPGKERELVAAISLGTNTYYADSVKGRFTISRDNAKNTVYLQMNSLKPEDTAVYYCAVGPGGWDYHAYWGQGTQVTVSS

SEQ ID NO: 40011 - protein, 122 aa, Artificial Sequence
  Chemically Synthesized
QVQLQESGGGLVQAGGSLRLSCAASGNIFSTRYMGWYRQAPGKERELVAGITYGASTYYADSVKGRFTISRDNAKNTVYLQMNSLKPEDTAVYYCAVIAADSNDKYYDLWYWGQGTQVTVSS

SEQ ID NO: 40012 - protein, 119 aa, Artificial Sequence
  Chemically Synthesized
QVQLQESGGGLVQAGGSLRLSCAASGYISWTIFMGWYRQAPGKERELVAGIAQGSTTYYADSVKGRFTISRDNAKNTVYLQMNSLKPEDTAVYYCAVATFGDGRDYWYWGQGTQVTVSS

SEQ ID NO: 40013 - protein, 122 aa, Artificial Sequence
  Chemically Synthesized
QVQLQESGGGLVQAGGSLRLSCAASGSISWRVYMGWYRQAPGKERELVAGIDDGASTYYADSVKGRFTISRDNAKNTVYLQMNSLKPEDTAVYYCAVYGNNVGPGGKTYRYWGQGTQVTVSS

SEQ ID NO: 40014 - protein, 122 aa, Artificial Sequence
  Chemically Synthesized
QVQLQESGGGLVQAGGSLRLSCAASGYISGPIYMGWYRQAPGKERELVAGIAYGTTTNYADSVKGRFTISRDNAKNTVYLQMNSLKPEDTAVYYCAAIGFRDYDDDYPHRYWGQGTQVTVSS

SEQ ID NO: 40015 - protein, 119 aa, Artificial Sequence
  Chemically Synthesized
QVQLQESGGGLVQAGGSLRLSCAASGNISFVYWMGWYRQAPGKERELVAGIAYGGNTNYADSVKGRFTISRDNAKNTVYLQMNSLKPEDTAVYYCAVVYEPYDGSHWYWGQGTQVTVSS

SEQ ID NO: 40016 - protein, 122 aa, Artificial Sequence
  Chemically Synthesized
QVQLQESGGGLVQAGGSLRLSCAASGTISPTSYMGWYRQAPGKEREFVASISHGSITNYADSVKGRFTISRDNAKNTVYLQMNSLKPEDTAVYYCAVDDDDVWGRYAGYIYWGQGTQVTVSS

SEQ ID NO: 40017 - protein, 118 aa, Artificial Sequence
  Chemically Synthesized
QVQLQESGGGLVQAGGSLRLSCAASGNIFDIYTMGWYRQAPGKEREFVASITTGATTYYADSVKGRFTISRDNAKNTVYLQMNSLKPEDTAVYYCAALTLSAYYLVYWGQGTQVTVSS

SEQ ID NO: 40018 - protein, 125 aa, Artificial Sequence
  Chemically Synthesized
QVQLQESGGGLVQAGGSLRLSCAASGSISELRDMGWYRQAPGKEREFVASIITVLLPYADSVKGRFTISRDNAKNTVYLQMNSLKPEDTAVYYCAAGYYAFRGYTATGATGHDYWGQGTQVTVSS

SEQ ID NO: 40019 - protein, 117 aa, Artificial Sequence
  Chemically Synthesized
QVQLQESGGGLVQAGGSLRLSCAASGFSPQYSMGWYRQAPGKERELVATIDVGTNTYYADSVKGRFTISRDNAKNTVYLQMNSLKPEDTAVYYCAVGAQPPRYFGYWGQGTQVTVSS

SEQ ID NO: 40020 - protein, 122 aa, Artificial Sequence
  Chemically Synthesized
QVQLQESGGGLVQAGGSLRLSCAASGNIFTVEWMGWYRQAPGKERELVAGISYGGSTYYADSVKGRFTISRDNAKNTVYLQMNSLKPEDTAVYYCAVFISRHGLTRYDYWYWGQGTQVTVSS

SEQ ID NO: 40021 - protein, 118 aa, Artificial Sequence
  Chemically Synthesized
QVQLQESGGGLVQAGGSLRLSCAASGSISARSSMGWYRQAPGKERELVAAISYGGSTYYADSVKGRFTISRDNAKNTVYLQMNSLKPEDTAVYYCAAKRRWYHAFPYWGQGTQVTVSS

SEQ ID NO: 40022 - protein, 118 aa, Artificial Sequence
  Chemically Synthesized
QVQLQESGGGLVQAGGSLRLSCAASGNISNWGVMGWYRQAPGKEREFVAGIGLGTNTYYADSVKGRFTISRDNAKNTVYLQMNSLKPEDTAVYYCAAFDYPDGRHDYWGQGTQVTVSS

SEQ ID NO: 40023 - protein, 122 aa, Artificial Sequence
  Chemically Synthesized
QVQLQESGGGLVQAGGSLRLSCAASGYISRRVPMGWYRQAPGKEREFVASIGRGGNTYYADSVKGRFTISRDNAKNTVYLQMNSLKPEDTAVYYCAVVRISGDYYRYNHVYWGQGTQVTVSS

SEQ ID NO: 40024 - protein, 126 aa, Artificial Sequence
  Chemically Synthesized
QVQLQESGGGLVQAGGSLRLSCAASGYIFPSYSMGWYRQAPGKEREFVAAIGVGSNTNYADSVKGRFTISRDNAKNTVYLQMNSLKPEDTAVYYCAPYLDRHVYDKVVGDRALWYWGQGTQVTVSS

SEQ ID NO: 40025 - protein, 111 aa, Artificial Sequence
  Chemically Synthesized
QVQLQESGGGLVQAGGSLRLSCAASGNIFRNDQMGWYRQAPGKEREFVAGINAGGNTYYADSVKGRFTISRDNAKNTVYLQMNSLKPEDTAVYYCAARIYWGQGTQVTVSS

SEQ ID NO: 40026 - protein, 118 aa, Artificial Sequence
  Chemically Synthesized
QVQLQESGGGLVQAGGSLRLSCAASGYISDLLYMGWYRQAPGKEREFVAAINVGTTTNYADSVKGRFTISRDNAKNTVYLQMNSLKPEDTAVYYCAVVRRKDSTHYYWGQGTQVTVSS

SEQ ID NO: 40027 - protein, 118 aa, Artificial Sequence
  Chemically Synthesized
QVQLQESGGGLVQAGGSLRLSCAASGNISRIDVMGWYRQAPGKERELVAAIATGSSTYYADSVKGRFTISRDNAKNTVYLQMNSLKPEDTAVYYCAAHTLSIAYFGYWGQGTQVTVSS

SEQ ID NO: 40028 - protein, 122 aa, Artificial Sequence
  Chemically Synthesized
QVQLQESGGGLVQAGGSLRLSCAASGYISYKYPMGWYRQAPGKEREFVAAIGDGTITNYADSVKGRFTISRDNAKNTVYLQMNSLKPEDTAVYYCAAGRFEIYLRYGSLAYWGQGTQVTVSS

SEQ ID NO: 40029 - protein, 117 aa, Artificial Sequence
  Chemically Synthesized
QVQLQESGGGLVQAGGSLRLSCAASGNISGWDDMGWYRQAPGKERELVATITYGASTNYADSVKGRFTISRDNAKNTVYLQMNSLKPEDTAVYYCAAAPRYNSLVYWGQGTQVTVSS

SEQ ID NO: 40030 - protein, 124 aa, Artificial Sequence
  Chemically Synthesized
QVQLQESGGGLVQAGGSLRLSCAASGYIFAYYPMGWYRQAPGKEREFVAAIASGTNTYYADSVKGRFTISRDNAKNTVYLQMNSLKPEDTAVYYCAVTDGTAWYYGYYRDHGYWGQGTQVTVSS

SEQ ID NO: 40031 - protein, 119 aa, Artificial Sequence
  Chemically Synthesized
QVQLQESGGGLVQAGGSLRLSCAASGTIFYAYGMGWYRQAPGKEREFVASITHGTNTYYADSVKGRFTISRDNAKNTVYLQMNSLKPEDTAVYYCAYYGRADGVYHLYWGQGTQVTVSS

SEQ ID NO: 40032 - protein, 122 aa, Artificial Sequence
  Chemically Synthesized
QVQLQESGGGLVQAGGSLRLSCAASGSIFYTYFMGWYRQAPGKEREFVAGIAIGASTNYADSVKGRFTISRDNAKNTVYLQMNSLKPEDTAVYYCAAFTGHYGLNHATHWYWGQGTQVTVSS

SEQ ID NO: 40033 - protein, 118 aa, Artificial Sequence
  Chemically Synthesized
QVQLQESGGGLVQAGGSLRLSCAASGSIFDDYDMGWYRQAPGKERELVAAIAGGSNTYYADSVKGRFTISRDNAKNTVYLQMNSLKPEDTAVYYCAAYPIYGVLHVYWGQGTQVTVSS

SEQ ID NO: 40034 - protein, 126 aa, Artificial Sequence
  Chemically Synthesized
QVQLQESGGGLVQAGGSLRLSCAASGYIFAYYQMGWYRQAPGKEREFVAAISVGGTTNYADSVKGRFTISRDNAKNTVYLQMNSLKPEDTAVYYCAVVPLVYNPDWYPPATYHHYWGQGTQVTVSS

SEQ ID NO: 40035 - protein, 122 aa, Artificial Sequence
  Chemically Synthesized
QVQLQESGGGLVQAGGSLRLSCAASGSISPRPSMGWYRQAPGKERELVASINTGANTNYADSVKGRFTISRDNAKNTVYLQMNSLKPEDTAVYYCAADNGLSRYLRDIYDYWGQGTQVTVSS

SEQ ID NO: 40036 - protein, 126 aa, Artificial Sequence
  Chemically Synthesized
QVQLQESGGGLVQAGGSLRLSCAASGYIFGRYAMGWYRQAPGKERELVAGIGVGATTNYADSVKGRFTISRDNAKNTVYLQMNSLKPEDTAVYYCAVPLDYPDYATAYYSYYYPYWGQGTQVTVSS

SEQ ID NO: 40037 - protein, 118 aa, Artificial Sequence
  Chemically Synthesized
QVQLQESGGGLVQAGGSLRLSCAASGYISLGINMGWYRQAPGKEREFVAAISYGSINQYADSVKGRFTISRDNAKNTVYLQMNSLKPEDTAVYYCAVSFERVNAHAYWGQGTQVTVSS

SEQ ID NO: 40038 - protein, 118 aa, Artificial Sequence
  Chemically Synthesized
QVQLQESGGGLVQAGGSLRLSCAASGSIFVEYPMGWYRQAPGKEREFVATIGTGTNTNYADSVKGRFTISRDNAKNTVYLQMNSLKPEDTAVYYCAAVDDGTGGYSYWGQGTQVTVSS

SEQ ID NO: 40039 - protein, 122 aa, Artificial Sequence
  Chemically Synthesized
QVQLQESGGGLVQAGGSLRLSCAASGSIFQYLYMGWYRQAPGKERELVAGISIGTSTYYADSVKGRFTISRDNAKNTVYLQMNSLKPEDTAVYYCAVLVTVRPSQDFPFRYWGQGTQVTVSS

SEQ ID NO: 40040 - protein, 121 aa, Artificial Sequence
  Chemically Synthesized
QVQLQESGGGLVQAGGSLRLSCAASGNTCMGWYRQAPGKEREFVAGIARGGNTYYADSVKGRFTISRDNAKNTVYLQMNSLKPEDTAVYYCAAYLPDSIGDTQDQYGHWYWGQGTQVTVSS

SEQ ID NO: 40041 - protein, 125 aa, Artificial Sequence
  Chemically Synthesized
QVQLQESGGGLVQAGGSLRLSCAASGYISTVRYMGWYRQAPGKEREFVAAIGNGATTNYADSVKGRFTISRDNAKNTVYLQMNSLKPEDTAVYYCAATRYTLSNTRFLRLTSIYWGQGTQVTVSS

SEQ ID NO: 40042 - protein, 122 aa, Artificial Sequence
  Chemically Synthesized
QVQLQESGGGLVQAGGSLRLSCAASGNISLQVFMGWYRQAPGKERELVAGITFGSSTYYADSVKGRFTISRDNAKNTVYLQMNSLKPEDTAVYYCAVYYHDVGAGRGQYNYWGQGTQVTVSS

SEQ ID NO: 40043 - protein, 117 aa, Artificial Sequence
  Chemically Synthesized
QVQLQESGGGLVQAGGSLRLSCAASGTIFVSLMGWYRQAPGKEREFVASIGDGASTYYADSVKGRFTISRDNAKNTVYLQMNSLKPEDTAVYYCAVELLDGSAYNYWGQGTQVTVSS

SEQ ID NO: 40044 - protein, 118 aa, Artificial Sequence
  Chemically Synthesized
QVQLQESGGGLVQAGGSLRLSCAASGYIFRYAQMGWYRQAPGKEREFVATITTGTITYYADSVKGRFTISRDNAKNTVYLQMNSLKPEDTAVYYCAATRVGNFEHDYWGQGTQVTVSS

SEQ ID NO: 40045 - protein, 122 aa, Artificial Sequence
  Chemically Synthesized
QVQLQESGGGLVQAGGSLRLSCAASGTIFFLQYMGWYRQAPGKERELVATIALGTTTKYADSVKGRFTISRDNAKNTVYLQMNSLKPEDTAVYYCAVGLYFQTYSATAHSYWGQGTQVTVSS

SEQ ID NO: 40046 - protein, 118 aa, Artificial Sequence
  Chemically Synthesized
QVQLQESGGGLVQAGGSLRLSCAASGSISHFAVMGWYRQAPGKEREFVAAIGAGSNTYYADSVKGRFTISRDNAKNTVYLQMNSLKPEDTAVYYCAAHSKYHADLDYWGQGTQVTVSS

SEQ ID NO: 40047 - protein, 122 aa, Artificial Sequence
  Chemically Synthesized
QVQLQESGGGLVQAGGSLRLSCAASGSISYVGGMGWYRQAPGKEREFVASIAYGSSTNYADSVKGRFTISRDNAKNTVYLQMNSLKPEDTAVYYCAAWLYSVLHYWYKHVYWGQGTQVTVSS

SEQ ID NO: 40048 - protein, 122 aa, Artificial Sequence
  Chemically Synthesized
QVQLQESGGGLVQAGGSLRLSCAASGSISPSAYMGWYRQAPGKERELVAAITTGGNTNYADSVKGRFTISRDNAKNTVYLQMNSLKPEDTAVYYCAVVFLGERILQYYYRYWGQGTQVTVSS

SEQ ID NO: 40049 - protein, 118 aa, Artificial Sequence
  Chemically Synthesized
QVQLQESGGGLVQAGGSLRLSCAASGSIFYYRYMGWYRQAPGKEREFVAGITAGTTTYYADSVKGRFTISRDNAKNTVYLQMNSLKPEDTAVYYCAVATGRTLKYPYWGQGTQVTVSS

SEQ ID NO: 40050 - protein, 122 aa, Artificial Sequence
  Chemically Synthesized
QVQLQESGGGLVQAGGSLRLSCAASGSIFVDYSMGWYRQAPGKERELVAAIATGASTYYADSVKGRFTISRDNAKNTVYLQMNSLKPEDTAVYYCAVKADTGSRSYVAHFYWGQGTQVTVSS

SEQ ID NO: 40051 - protein, 122 aa, Artificial Sequence
  Chemically Synthesized
QVQLQESGGGLVQAGGSLRLSCAASGSISRIYFMGWYRQAPGKERELVAAIAYGGTTNYADSVKGRFTISRDNAKNTVYLQMNSLKPEDTAVYYCAAFLETTYAYGQTYWYWGQGTQVTVSS

SEQ ID NO: 40052 - protein, 118 aa, Artificial Sequence
  Chemically Synthesized
QVQLQESGGGLVQAGGSLRLSCAASGYISWYAYMGWYRQAPGKERELVAGINVGATTYYADSVKGRFTISRDNAKNTVYLQMNSLKPEDTAVYYCAVEVYPDQDLPYWGQGTQVTVSS

SEQ ID NO: 40053 - protein, 122 aa, Artificial Sequence
  Chemically Synthesized
QVQLQESGGGLVQAGGSLRLSCAASGSIFDPTLMGWYRQAPGKERELVATITSGTITNYADSVKGRFTISRDNAKNTVYLQMNSLKPEDTAVYYCAAHFSATWNYSAGHRYWGQGTQVTVSS

SEQ ID NO: 40054 - protein, 117 aa, Artificial Sequence
  Chemically Synthesized
QVQLQESGGGLVQAGGSLRLSCAASGSIFTGKTMGWYRQAPGKEREFVAGIGAGANTNYADSVKGRFTISRDNAKNTVYLQMNSLKPEDTAVYYCAADNIGDAVQYWGQGTQVTVSS

SEQ ID NO: 40055 - protein, 118 aa, Artificial Sequence
  Chemically Synthesized
QVQLQESGGGLVQAGGSLRLSCAASGTISWWTYMGWYRQAPGKEREFVAGIAIGGITYYADSVKGRFTISRDNAKNTVYLQMNSLKPEDTAVYYCAAFAPNWAGYDYWGQGTQVTVSS

SEQ ID NO: 40056 - protein, 121 aa, Artificial Sequence
  Chemically Synthesized
QVQLQESGGGLVQAGGSLRLSCAASGSISHNSMGWYRQAPGKEREFVAGITVGSITYYADSVKGRFTISRDNAKNTVYLQMNSLKPEDTAVYYCAVGRYGDDDSSAFHEYWGQGTQVTVSS

SEQ ID NO: 40057 - protein, 122 aa, Artificial Sequence
  Chemically Synthesized
QVQLQESGGGLVQAGGSLRLSCAASGYIFLQYGMGWYRQAPGKEREFVATITWGGTTYYADSVKGRFTISRDNAKNTVYLQMNSLKPEDTAVYYCAVGTYYQAQVHYPYPYWGQGTQVTVSS

SEQ ID NO: 40058 - protein, 122 aa, Artificial Sequence
  Chemically Synthesized
QVQLQESGGGLVQAGGSLRLSCAASGTISHLAYMGWYRQAPGKERELVAGITYGGITNYADSVKGRFTISRDNAKNTVYLQMNSLKPEDTAVYYCAVIDWGIYFDYYFLDYWGQGTQVTVSS

SEQ ID NO: 40059 - protein, 118 aa, Artificial Sequence
  Chemically Synthesized
QVQLQESGGGLVQAGGSLRLSCAASGTIFPTYFMGWYRQAPGKEREFVAAIGIGSITYYADSVKGRFTISRDNAKNTVYLQMNSLKPEDTAVYYCAVYAYSGGYYPYWGQGTQVTVSS

SEQ ID NO: 40060 - protein, 117 aa, Artificial Sequence
  Chemically Synthesized
QVQLQESGGGLVQAGGSLRLSCAASGNIFHVYYMGWYRQAPGKEREFVATINYGATTYYADSVKGRFTISRDNAKNTVYLQMNSLKPEDTAVYYCAAGDTSLLVIYWGQGTQVTVSS

SEQ ID NO: 40061 - protein, 122 aa, Artificial Sequence
  Chemically Synthesized
QVQLQESGGGLVQAGGSLRLSCAASGNIFVYDYMGWYRQAPGKEREFVAGINYGSTTYYADSVKGRFTISRDNAKNTVYLQMNSLKPEDTAVYYCAAYWIYDYAGDTYYEYWGQGTQVTVSS

SEQ ID NO: 40062 - protein, 122 aa, Artificial Sequence
  Chemically Synthesized
QVQLQESGGGLVQAGGSLRLSCAASGSIFYVIAMGWYRQAPGKERELVATITAGTNTYYADSVKGRFTISRDNAKNTVYLQMNSLKPEDTAVYYCAVYALQQDDYDRSHAYWGQGTQVTVSS

SEQ ID NO: 40063 - protein, 118 aa, Artificial Sequence
  Chemically Synthesized
QVQLQESGGGLVQAGGSLRLSCAASGNISYQGDMGWYRQAPGKERELVAAIAAGANTNYADSVKGRFTISRDNAKNTVYLQMNSLKPEDTAVYYCAAYYYYIDQHNYWGQGTQVTVSS

SEQ ID NO: 40064 - protein, 118 aa, Artificial Sequence
  Chemically Synthesized
QVQLQESGGGLVQAGGSLRLSCAASGSISETEIMGWYRQAPGKEREFVAAISPGGNTNYADSVKGRFTISRDNAKNTVYLQMNSLKPEDTAVYYCAVFPDDPLDYVYWGQGTQVTVSS

SEQ ID NO: 40065 - protein, 126 aa, Artificial Sequence
  Chemically Synthesized
QVQLQESGGGLVQAGGSLRLSCAASGNISLYYDMGWYRQAPGKERELVAAIDPGTITYYADSVKGRFTISRDNAKNTVYLQMNSLKPEDTAVYYCAVVIPDYVYRYVVGTVDYGYWGQGTQVTVSS

SEQ ID NO: 40066 - protein, 122 aa, Artificial Sequence
  Chemically Synthesized
QVQLQESGGGLVQAGGSLRLSCAASGYISIPRRMGWYRQAPGKEREFVATITAGASTYYADSVKGRFTISRDNAKNTVYLQMNSLKPEDTAVYYCAAVDNDGGWPVAYLVYWGQGTQVTVSS

SEQ ID NO: 40067 - protein, 118 aa, Artificial Sequence
  Chemically Synthesized
QVQLQESGGGLVQAGGSLRLSCAASGTFLVLTMGWYRQAPGKEREFVATIDQGGITYYADSVKGRFTISRDNAKNTVYLQMNSLKPEDTAVYYCAAVYVVYPDTHRYWGQGTQVTVSS

SEQ ID NO: 40068 - protein, 121 aa, Artificial Sequence
  Chemically Synthesized
QVQLQESGGGLVQAGGSLRLSCAASGSISLNSDMGWYRQAPGKERELVATIGYGANTNYADSVKGRFTISRDNAKNTVYLQMNSLKPEDTAVYYCAVEPWQEVTLTRILYWGQGTQVTVSS

SEQ ID NO: 40069 - protein, 116 aa, Artificial Sequence
  Chemically Synthesized
QVQLQESGGGLVQAGGSLRLSCAASGTISPSTTMGWYRQAPGKEREFVPVLLSVLLPYADSVKGRFTISRDNAKNTVYLQMNSLKPEDTAVYYCAVYRSTFLTIYWGQGTQVTVSS

SEQ ID NO: 40070 - protein, 126 aa, Artificial Sequence
  Chemically Synthesized
QVQLQESGGGLVQAGGSLRLSCAASGNIFSRIYMGWYRQAPGKEREFVAAIAYGSNTYYADSVKGRFTISRDNAKNTVYLQMNSLKPEDTAVYYCAAYTWTTRFYGAYGSTYHYYWGQGTQVTVSS

SEQ ID NO: 40071 - protein, 117 aa, Artificial Sequence
  Chemically Synthesized
QVQLQESGGGLVQAGGSLRLSCAASGNIFGRFMGWYRQAPGKERELVATIAQGTSTYYADSVKGRFTISRDNAKNTVYLQMNSLKPEDTAVYYCAVVYYYVGYFGYWGQGTQVTVSS

SEQ ID NO: 40072 - protein, 121 aa, Artificial Sequence
  Chemically Synthesized
QVQLQESGGGLVQAGGSLRLSCAASGTIFYHGGMGWYRQAPGKERELVAAIATGSSTNYADSVKGRFTISRDNAKNTVYLQMNSLKPEDTAVYYCAATPEGNYKKADYLYWGQGTQVTVSS

SEQ ID NO: 40073 - protein, 121 aa, Artificial Sequence
  Chemically Synthesized
QVQLQESGGGLVQAGGSLRLSCAASGYISWAVDMGWYRQAPGKEREFVASISRGSTTNYADSVKGRFTISRDNAKNTVYLQMNSLKPEDTAVYYCAVYYGISPWWIYHAYWGQGTQVTVSS

SEQ ID NO: 40074 - protein, 125 aa, Artificial Sequence
  Chemically Synthesized
QVQLQESGGGLVQAGGSLRLSCAASGTISIRYSMGWYRQAPGKEREFVAAITQGAITNYADSVKGRFTISRDNAKNTVYLQMNSLKPEDTAVYYCAVYLRDSDGPRWDAQYEHYWGQGTQVTVSS

SEQ ID NO: 40075 - protein, 118 aa, Artificial Sequence
  Chemically Synthesized
QVQLQESGGGLVQAGGSLRLSCAASGTIFGRRYMGWYRQAPGKEREFVAAIARGATTYYADSVKGRFTISRDNAKNTVYLQMNSLKPEDTAVYYCAAYYNPSAIHRYWGQGTQVTVSS

SEQ ID NO: 40076 - protein, 121 aa, Artificial Sequence
  Chemically Synthesized
QVQLQESGGGLVQAGGSLRLSCAASGNIFRFADMGWYRQAPGKERELVAGIDWGATTNYADSVKGRFTISRDNAKNTVYLQMNSLKPEDTAVYYCAVSDEDVVVFGFLYYWGQGTQVTVSS

SEQ ID NO: 40077 - protein, 116 aa, Artificial Sequence
  Chemically Synthesized
QVQLQESGGGLVQAGGSLRLSCAASGYIFTYDMGWYRQAPGKERELLPVLVLVVIPYADSVKGRFTISRDNAKNTVYLQMNSLKPEDTAVYYCAARVSVTRDHFYWGQGTQVTVSS

SEQ ID NO: 40078 - protein, 122 aa, Artificial Sequence
  Chemically Synthesized
QVQLQESGGGLVQAGGSLRLSCAASGNISPYILMGWYRQAPGKERELVATISRGTSTYYADSVKGRFTISRDNAKNTVYLQMNSLKPEDTAVYYCAASDFGNDATTAPYYYWGQGTQVTVSS

SEQ ID NO: 40079 - protein, 122 aa, Artificial Sequence
  Chemically Synthesized
QVQLQESGGGLVQAGGSLRLSCAASGSISGTIYMGWYRQAPGKEREFVASINYGTNTYYADSVKGRFTISRDNAKNTVYLQMNSLKPEDTAVYYCAAAYHDTTNLWTAHYYWGQGTQVTVSS

SEQ ID NO: 40080 - protein, 116 aa, Artificial Sequence
  Chemically Synthesized
QVQLQESGGGLVQAGGSLRLSCAASGTIFDKAFMGWYRQAPGKEREFVAGIGHGSNTNYADSVKGRFTISRDNAKNTVYLQMNSLKPEDTAVYYCAALVDADFYYWGQGTQVTVSS

SEQ ID NO: 40081 - protein, 111 aa, Artificial Sequence
  Chemically Synthesized
QVQLQESGGGLVQAGGSLRLSCAASGTIFSDGRMGWYRQAPGKEREFVAAIGLGGNTNYADSVKGRFTISRDNAKNTVYLQMNSLKPEDTAVYYCAAQIYWGQGTQVTVSS

SEQ ID NO: 40082 - protein, 122 aa, Artificial Sequence
  Chemically Synthesized
QVQLQESGGGLVQAGGSLRLSCAASGNIFNDWAMGWYRQAPGKERELVAAIASGAITYYADSVKGRFTISRDNAKNTVYLQMNSLKPEDTAVYYCAAQIHEEHGTTYYYVYWGQGTQVTVSS

SEQ ID NO: 40083 - protein, 118 aa, Artificial Sequence
  Chemically Synthesized
QVQLQESGGGLVQAGGSLRLSCAASGNISYYDYMGWYRQAPGKERELVAGITFGSTTYYADSVKGRFTISRDNAKNTVYLQMNSLKPEDTAVYYCAVYATLDPPHEYWGQGTQVTVSS

SEQ ID NO: 40084 - protein, 120 aa, Artificial Sequence
  Chemically Synthesized
QVQLQESGGGLVQAGGSLRLSCAASGNIFYGPEMGWYRQAPGKERELLPLLVTVVIPYADSVKGRFTISRDNAKNTVYLQMNSLKPEDTAVYYCAVAGGYSGTDPDHDYWGQGTQVTVSS

SEQ ID NO: 40085 - protein, 126 aa, Artificial Sequence
  Chemically Synthesized
QVQLQESGGGLVQAGGSLRLSCAASGNISFSWYMGWYRQAPGKERELVAAIGYGTNTYYADSVKGRFTISRDNAKNTVYLQMNSLKPEDTAVYYCAAWSTAHYAYFRPQFILYDYWGQGTQVTVSS

SEQ ID NO: 40086 - protein, 122 aa, Artificial Sequence
  Chemically Synthesized
QVQLQESGGGLVQAGGSLRLSCAASGSIFSIFVMGWYRQAPGKEREFVATISTGGSTNYADSVKGRFTISRDNAKNTVYLQMNSLKPEDTAVYYCAATGWYRWLYLYDFVYWGQGTQVTVSS

SEQ ID NO: 40087 - protein, 118 aa, Artificial Sequence
  Chemically Synthesized
QVQLQESGGGLVQAGGSLRLSCAASGYISIVLSMGWYRQAPGKEREFVASISSGSTTYYADSVKGRFTISRDNAKNTVYLQMNSLKPEDTAVYYCAALGHDRYDHWYWGQGTQVTVSS

SEQ ID NO: 40088 - protein, 121 aa, Artificial Sequence
  Chemically Synthesized
QVQLQESGGGLVQAGGSLRLSCAASGTIFTLDVMGWYRQAPGKEREFVASISSGTITYYADSVKGRFTISRDNAKNTVYLQMNSLKPEDTAVYYCAAATYVYGPPLTTLYWGQGTQVTVSS

SEQ ID NO: 40089 - protein, 118 aa, Artificial Sequence
  Chemically Synthesized
QVQLQESGGGLVQAGGSLRLSCAASGTISSGSFMGWYRQAPGKEREFVAAINNGANTNYADSVKGRFTISRDNAKNTVYLQMNSLKPEDTAVYYCAVAYVQRYAFVYWGQGTQVTVSS

SEQ ID NO: 40090 - protein, 116 aa, Artificial Sequence
  Chemically Synthesized
QVQLQESGGGLVQAGGSLRLSCAASGSISPDLVMGWYRQAPGKERELVATIAYGGTTNYADSVKGRFTISRDNAKNTVYLQMNSLKPEDTAVYYCAAYEARGYVYWGQGTQVTVSS

SEQ ID NO: 40091 - protein, 117 aa, Artificial Sequence
  Chemically Synthesized
QVQLQESGGGLVQAGGSLRLSCAASGNISYYFDMGWYRQAPGKERELVATISSVLLPYADSVKGRFTISRDNAKNTVYLQMNSLKPEDTAVYYCAVFRIGVAAFTYWGQGTQVTVSS

SEQ ID NO: 40092 - protein, 118 aa, Artificial Sequence
  Chemically Synthesized
QVQLQESGGGLVQAGGSLRLSCAASGNISYYQSMGWYRQAPGKERELVATISHGGSTNYADSVKGRFTISRDNAKNTVYLQMNSLKPEDTAVYYCAVITDDELYLYYWGQGTQVTVSS

SEQ ID NO: 40093 - protein, 122 aa, Artificial Sequence
  Chemically Synthesized
QVQLQESGGGLVQAGGSLRLSCAASGSISRYDYMGWYRQAPGKERELVAAIADGANTNYADSVKGRFTISRDNAKNTVYLQMNSLKPEDTAVYYCAVLWYDPDLYNYFFLYWGQGTQVTVSS

SEQ ID NO: 40094 - protein, 118 aa, Artificial Sequence
  Chemically Synthesized
QVQLQESGGGLVQAGGSLRLSCAASGTISYAYRMGWYRQAPGKERELVATITRGASTYYADSVKGRFTISRDNAKNTVYLQMNSLKPEDTAVYYCAVDGYPPYPHPYWGQGTQVTVSS

SEQ ID NO: 40095 - protein, 114 aa, Artificial Sequence
  Chemically Synthesized
QVQLQESGGGLVQAGGSLRLSCAASGNIFMGWYRQAPGKERELVAGIAYGAITYYADSVKGRFTISRDNAKNTVYLQMNSLKPEDTAVYYCAVGDYRDYDHPYWGQGTQVTVSS

SEQ ID NO: 40096 - protein, 121 aa, Artificial Sequence
  Chemically Synthesized
QVQLQESGGGLVQAGGSLRLSCAASGYISYDSPMGWYRQAPGKERELVATITFGGITNYADSVKGRFTISRDNAKNTVYLQMNSLKPEDTAVYYCAVVDYPGDQRDYSMYWGQGTQVTVSS

SEQ ID NO: 40097 - protein, 118 aa, Artificial Sequence
  Chemically Synthesized
QVQLQESGGGLVQAGGSLRLSCAASGTIFAASNMGWYRQAPGKERELVAGINIGTTTYYADSVKGRFTISRDNAKNTVYLQMNSLKPEDTAVYYCAVGDDDRYRLDYWGQGTQVTVSS

SEQ ID NO: 40098 - protein, 114 aa, Artificial Sequence
  Chemically Synthesized
QVQLQESGGGLVQAGGSLRLSCAASGSISLSDYMGWYRQAPGKERELVAAISQGSTTNYADSVKGRFTISRDNAKNTVYLQMNSLKPEDTAVYYCAAGGRHTYWGQGTQVTVSS

SEQ ID NO: 40099 - protein, 118 aa, Artificial Sequence
  Chemically Synthesized
QVQLQESGGGLVQAGGSLRLSCAASGNISYDDGMGWYRQAPGKERELVATITVGASTYYADSVKGRFTISRDNAKNTVYLQMNSLKPEDTAVYYCAATQYVERGHYYWGQGTQVTVSS

SEQ ID NO: 40100 - protein, 118 aa, Artificial Sequence
  Chemically Synthesized
QVQLQESGGGLVQAGGSLRLSCAASGYIFDDFIMGWYRQAPGKERELVAAIGYGSITNYADSVKGRFTISRDNAKNTVYLQMNSLKPEDTAVYYCAAGALSPGIYAYWGQGTQVTVSS

SEQ ID NO: 40101 - protein, 118 aa, Artificial Sequence
  Chemically Synthesized
QVQLQESGGGLVQAGGSLRLSCAASGSIFRWTYMGWYRQAPGKERELVATIAAGAITNYADSVKGRFTISRDNAKNTVYLQMNSLKPEDTAVYYCAALYIDPDRLWYWGQGTQVTVSS

SEQ ID NO: 40102 - protein, 117 aa, Artificial Sequence
  Chemically Synthesized
QVQLQESGGGLVQAGGSLRLSCAASGTIFDPDVMGWYRQAPGKEREFVAAIGGGATTYYADSVKGRFTISRDNAKNTVYLQMNSLKPEDTAVYYCAAGWLVSLSIYWGQGTQVTVSS

SEQ ID NO: 40103 - protein, 118 aa, Artificial Sequence
  Chemically Synthesized
QVQLQESGGGLVQAGGSLRLSCAASGNISQIAYMGWYRQAPGKERELVATIGWGGNTNYADSVKGRFTISRDNAKNTVYLQMNSLKPEDTAVYYCAASYPGFNALTYWGQGTQVTVSS

SEQ ID NO: 40104 - protein, 122 aa, Artificial Sequence
  Chemically Synthesized
QVQLQESGGGLVQAGGSLRLSCAASGTISQFQEMGWYRQAPGKERELVASIDTGGSTYYADSVKGRFTISRDNAKNTVYLQMNSLKPEDTAVYYCAVDVLNIYYYADRHVYWGQGTQVTVSS

SEQ ID NO: 40105 - protein, 126 aa, Artificial Sequence
  Chemically Synthesized
QVQLQESGGGLVQAGGSLRLSCAASGYISGAWLMGWYRQAPGKEREFVAAIDRGGNTNYADSVKGRFTISRDNAKNTVYLQMNSLKPEDTAVYYCAARRKGDHPRTTIPYDSHWYWGQGTQVTVSS

SEQ ID NO: 40106 - protein, 118 aa, Artificial Sequence
  Chemically Synthesized
QVQLQESGGGLVQAGGSLRLSCAASGYISDITIMGWYRQAPGKEREFVASISVGTTTYYADSVKGRFTISRDNAKNTVYLQMNSLKPEDTAVYYCAVYYDGDDDHGYWGQGTQVTVSS

SEQ ID NO: 40107 - protein, 126 aa, Artificial Sequence
  Chemically Synthesized
QVQLQESGGGLVQAGGSLRLSCAASGYIFPVLVMGWYRQAPGKERELVATIDHGANTYYADSVKGRFTISRDNAKNTVYLQMNSLKPEDTAVYYCAAGQEYGIGWGRTYYYSLSYWGQGTQVTVSS

SEQ ID NO: 40108 - protein, 121 aa, Artificial Sequence
  Chemically Synthesized
QVQLQESGGGLVQAGGSLRLSCAASGSISIYIPMGWYRQAPGKERELVAGIDSVLVPYADSVKGRFTISRDNAKNTVYLQMNSLKPEDTAVYYCAVYPPIFVDYRDDHVYWGQGTQVTVSS

SEQ ID NO: 40109 - protein, 121 aa, Artificial Sequence
  Chemically Synthesized
QVQLQESGGGLVQAGGSLRLSCAASGTIFREYYMGWYRQAPGKERELVAAITVGANTNYADSVKGRFTISRDNAKNTVYLQMNSLKPEDTAVYYCAAYAHVQSYDWELFYWGQGTQVTVSS

SEQ ID NO: 40110 - protein, 118 aa, Artificial Sequence
  Chemically Synthesized
QVQLQESGGGLVQAGGSLRLSCAASGTISVRFVMGWYRQAPGKEREFVASIDSGTTTYYADSVKGRFTISRDNAKNTVYLQMNSLKPEDTAVYYCAAQVTWDKKYYYWGQGTQVTVSS

SEQ ID NO: 40111 - protein, 118 aa, Artificial Sequence
  Chemically Synthesized
QVQLQESGGGLVQAGGSLRLSCAASGYISPYSGMGWYRQAPGKEREFVASIGTGSNTYYADSVKGRFTISRDNAKNTVYLQMNSLKPEDTAVYYCAADNINTIHYRYWGQGTQVTVSS

SEQ ID NO: 40112 - protein, 122 aa, Artificial Sequence
  Chemically Synthesized
QVQLQESGGGLVQAGGSLRLSCAASGNISALRGMGWYRQAPGKEREFVASINPGGITYYADSVKGRFTISRDNAKNTVYLQMNSLKPEDTAVYYCAAAELGYDGIPTRLGYWGQGTQVTVSS

SEQ ID NO: 40113 - protein, 126 aa, Artificial Sequence
  Chemically Synthesized
QVQLQESGGGLVQAGGSLRLSCAASGNISGRHRMGWYRQAPGKERELVAGIDNGATTYYADSVKGRFTISRDNAKNTVYLQMNSLKPEDTAVYYCAVDGQADDPDFVYPYYDHDYWGQGTQVTVSS

SEQ ID NO: 40114 - protein, 127 aa, Artificial Sequence
  Chemically Synthesized
QVQLQESGGGLVQAGGSLRLSCAASGTIFPNYDMGWYRQAPGKEREFVAGITDVGGNTYYADSVKGRFTISRDNAKNTVYLQMNSLKPEDTAVYYCAAGYAGDTTQDDEGLSVLGYWGQGTQVTVSS

SEQ ID NO: 40115 - protein, 123 aa, Artificial Sequence
  Chemically Synthesized
QVQLQESGGGLVQAGGSLRLSCAASGTIFVYATMGWYRQAPGKERELVAAIDGGGITNYADSVKGRFTISRDNAKNTVYLQMNSLKPEDTAVYYCAAYWAYTYRAAPVALGYWGQGTQVTVSS

SEQ ID NO: 40116 - protein, 118 aa, Artificial Sequence
  Chemically Synthesized
QVQLQESGGGLVQAGGSLRLSCAASGNISPILRMGWYRQAPGKEREFVAGISEGASTNYADSVKGRFTISRDNAKNTVYLQMNSLKPEDTAVYYCAVYKRYDDEFDYWGQGTQVTVSS

SEQ ID NO: 40117 - protein, 117 aa, Artificial Sequence
  Chemically Synthesized
QVQLQESGGGLVQAGGSLRLSCAASGNISWSLMGWYRQAPGKERELVAGISVGSSTNYADSVKGRFTISRDNAKNTVYLQMNSLKPEDTAVYYCAVRVSEVGSLLYWGQGTQVTVSS

SEQ ID NO: 40118 - protein, 116 aa, Artificial Sequence
  Chemically Synthesized
QVQLQESGGGLVQAGGSLRLSCAASGYIFTGTMGWYRQAPGKEREFVATIDDGTITYADSVKGRFTISRDNAKNTVYLQMNSLKPEDTAVYYCAADNTGYYAFTYWGQGTQVTVSS

SEQ ID NO: 40119 - protein, 122 aa, Artificial Sequence
  Chemically Synthesized
QVQLQESGGGLVQAGGSLRLSCAASGYISWYKTMGWYRQAPGKERELVASISRGASTNYADSVKGRFTISRDNAKNTVYLQMNSLKPEDTAVYYCAAGHHRRLSKYGPYLYWGQGTQVTVSS

SEQ ID NO: 40120 - protein, 117 aa, Artificial Sequence
  Chemically Synthesized
QVQLQESGGGLVQAGGSLRLSCAASGNISDAQYMGWYRQAPGKERELVAAISGGTSTYYADSVKGRFTISRDNAKNTVYLQMNSLKPEDTAVYYCAASTPITTSFYWGQGTQVTVSS

SEQ ID NO: 40121 - protein, 113 aa, Artificial Sequence
  Chemically Synthesized
QVQLQESGGGLVQAGGSLRLSCAASGTIFDDNDMGWYRQAPGKERELVAAITAGATTNYADSVKGRFTISRDNAKNTVYLQMNSLKPEDTAVYYCAASGDFYWGQGTQVTVSS

SEQ ID NO: 40122 - protein, 113 aa, Artificial Sequence
  Chemically Synthesized
QVQLQESGGGLVQAGGSLRLSCAASGYISDYTAMGWYRQAPGKEREFVATIGAGANTNYADSVKGRFTISRDNAKNTVYLQMNSLKPEDTAVYYCAAYAFGYWGQGTQVTVSS

SEQ ID NO: 40123 - protein, 118 aa, Artificial Sequence
  Chemically Synthesized
QVQLQESGGGLVQAGGSLRLSCAASGSISAATDMGWYRQAPGKEREFVAAIDQGGITNYADSVKGRFTISRDNAKNTVYLQMNSLKPEDTAVYYCAADTYKAFRHRYWGQGTQVTVSS

SEQ ID NO: 40124 - protein, 120 aa, Artificial Sequence
  Chemically Synthesized
QVQLQESGGGLVQAGGSLRLSCAASGTISIQGTMGWYRQAPGKERELVATMVVVLPYADSVKGRFTISRDNAKNTVYLQMNSLKPEDTAVYYCAVNIHRSDQRLVYHDYWGQGTQVTVSS

SEQ ID NO: 40125 - protein, 118 aa, Artificial Sequence
  Chemically Synthesized
QVQLQESGGGLVQAGGSLRLSCAASGSISGGYVMGWYRQAPGKEREFVASIARGATTYYADSVKGRFTISRDNAKNTVYLQMNSLKPEDTAVYYCAARRVGYDYYRYWGQGTQVTVSS

SEQ ID NO: 40126 - protein, 117 aa, Artificial Sequence
  Chemically Synthesized
QVQLQESGGGLVQAGGSLRLSCAASGYISLVGTMGWYRQAPGKERELVAAINYGAITNYADSVKGRFTISRDNAKNTVYLQMNSLKPEDTAVYYCAAREYTSFTFYWGQGTQVTVSS

SEQ ID NO: 40127 - protein, 122 aa, Artificial Sequence
  Chemically Synthesized
QVQLQESGGGLVQAGGSLRLSCAASGSIFEVSIMGWYRQAPGKERELVAGISSGATTNYADSVKGRFTISRDNAKNTVYLQMNSLKPEDTAVYYCAAYYWYYFGDRWNLHYWGQGTQVTVSS

SEQ ID NO: 40128 - protein, 122 aa, Artificial Sequence
  Chemically Synthesized
QVQLQESGGGLVQAGGSLRLSCAASGSISDGGVMGWYRQAPGKEREFVASIDPGGTTYYADSVKGRFTISRDNAKNTVYLQMNSLKPEDTAVYYCAAEATTDDDRPYPFDYWGQGTQVTVSS

SEQ ID NO: 40129 - protein, 118 aa, Artificial Sequence
  Chemically Synthesized
QVQLQESGGGLVQAGGSLRLSCAASGTISWEIRMGWYRQAPGKEREFVATISAGTSTYYADSVKGRFTISRDNAKNTVYLQMNSLKPEDTAVYYCAVTYPDYQSHAYWGQGTQVTVSS

SEQ ID NO: 40130 - protein, 118 aa, Artificial Sequence
  Chemically Synthesized
QVQLQESGGGLVQAGGSLRLSCAASGNISPGAKMGWYRQAPGKERELVASIANGSITNYADSVKGRFTISRDNAKNTVYLQMNSLKPEDTAVYYCAVFTDPGTWHHYWGQGTQVTVSS

SEQ ID NO: 40131 - protein, 123 aa, Artificial Sequence
  Chemically Synthesized
QVQLQESGGGLVQAGGSLRLSCAASGYIFAARAMGWYRQAPGKEREFVASISWGGSTYYADSVKGRFTISRDNAKNTVYLQMNSLKPEDTAVYYCAVPGRQDRNNVDLYHKYWGQGTQVTVSS

SEQ ID NO: 40132 - protein, 126 aa, Artificial Sequence
  Chemically Synthesized
QVQLQESGGGLVQAGGSLRLSCAASGSIFLRYRMGWYRQAPGKEREFVAAINYGGTTYYADSVKGRFTISRDNAKNTVYLQMNSLKPEDTAVYYCAASDDNYNLLRLPVSIDHYYWGQGTQVTVSS

SEQ ID NO: 40133 - protein, 117 aa, Artificial Sequence
  Chemically Synthesized
QVQLQESGGGLVQAGGSLRLSCAASGTIFGQSYMGWYRQAPGKERELVASIAYGITYYADSVKGRFTISRDNAKNTVYLQMNSLKPEDTAVYYCAVGAFPSYRHAYWGQGTQVTVSS

SEQ ID NO: 40134 - protein, 121 aa, Artificial Sequence
  Chemically Synthesized
QVQLQESGGGLVQAGGSLRLSCAASGNISSQPQMGWYRQAPGKEREFVASIDRGGNTNYADSVKGRFTISRDNAKNTVYLQMNSLKPEDTAVYYCAVGDIYYDVLSKLDYWGQGTQVTVSS

SEQ ID NO: 40135 - protein, 118 aa, Artificial Sequence
  Chemically Synthesized
QVQLQESGGGLVQAGGSLRLSCAASGSIFWRSYMGWYRQAPGKERELVATINPGSITNYADSVKGRFTISRDNAKNTVYLQMNSLKPEDTAVYYCAASTGYLTPFQYWGQGTQVTVSS

SEQ ID NO: 40136 - protein, 122 aa, Artificial Sequence
  Chemically Synthesized
QVQLQESGGGLVQAGGSLRLSCAASGNISFADAMGWYRQAPGKERELVATIDRGTTTNYADSVKGRFTISRDNAKNTVYLQMNSLKPEDTAVYYCAVWGYKDEWDSKSHLYWGQGTQVTVSS

SEQ ID NO: 40137 - protein, 116 aa, Artificial Sequence
  Chemically Synthesized
QVQLQESGGGLVQAGGSLRLSCAASGSIFNQTSMGWYRQAPGKEREFVAAIALGAITYYADSVKGRFTISRDNAKNTVYLQMNSLKPEDTAVYYCAAHALPVLRYWGQGTQVTVSS

SEQ ID NO: 40138 - protein, 117 aa, Artificial Sequence
  Chemically Synthesized
QVQLQESGGGLVQAGGSLRLSCAASGSIFNQVVMGWYRQAPGKERELVATIAHGTITYYADSVKGRFTISRDNAKNTVYLQMNSLKPEDTAVYYCAAVSIRYGSQYWGQGTQVTVSS

SEQ ID NO: 40139 - protein, 121 aa, Artificial Sequence
  Chemically Synthesized
QVQLQESGGGLVQAGGSLRLSCAASGNIFRTRIMGWYRQAPGKEREFVASIDGGGNTYADSVKGRFTISRDNAKNTVYLQMNSLKPEDTAVYYCAASPPEGVGDYYPHDYWGQGTQVTVSS

SEQ ID NO: 40140 - protein, 115 aa, Artificial Sequence
  Chemically Synthesized
QVQLQESGGGLVQAGGSLRLSCAASGTIFRTPYMGWYRQAPGKEREFVAGIASGGNTNYADSVKGRFTISRDNAKNTVYLQMNSLKPEDTAVYYCAVRNLLLLYWGQGTQVTVSS

SEQ ID NO: 40141 - protein, 118 aa, Artificial Sequence
  Chemically Synthesized
QVQLQESGGGLVQAGGSLRLSCAASGTISAGATMGWYRQAPGKEREFVATINAGGNTYYADSVKGRFTISRDNAKNTVYLQMNSLKPEDTAVYYCAARIYAPNAFYYWGQGTQVTVSS

SEQ ID NO: 40142 - protein, 118 aa, Artificial Sequence
  Chemically Synthesized
QVQLQESGGGLVQAGGSLRLSCAASGTISYYYSMGWYRQAPGKEREFVATIGYGTITYYADSVKGRFTISRDNAKNTVYLQMNSLKPEDTAVYYCAAVPWYWNGYPYWGQGTQVTVSS

SEQ ID NO: 40143 - protein, 122 aa, Artificial Sequence
  Chemically Synthesized
QVQLQESGGGLVQAGGSLRLSCAASGNIFDDVVMGWYRQAPGKEREFVASIAYGSNTYYADSVKGRFTISRDNAKNTVYLQMNSLKPEDTAVYYCAVTYGGDTQTDRWYYYWGQGTQVTVSS

SEQ ID NO: 40144 - protein, 116 aa, Artificial Sequence
  Chemically Synthesized
QVQLQESGGGLVQAGGSLRLSCAASGTIFEDATMGWYRQAPGKEREFVATIDIGSTTYYADSVKGRFTISRDNAKNTVYLQMNSLKPEDTAVYYCAVRGRWYLLYWGQGTQVTVSS

SEQ ID NO: 40145 - protein, 118 aa, Artificial Sequence
  Chemically Synthesized
QVQLQESGGGLVQAGGSLRLSCAASGNIFDDYGMGWYRQAPGKERELVATIDPGSNTNYADSVKGRFTISRDNAKNTVYLQMNSLKPEDTAVYYCAVPHNDVYAHYYWGQGTQVTVSS

SEQ ID NO: 40146 - protein, 115 aa, Artificial Sequence
  Chemically Synthesized
QVQLQESGGGLVQAGGSLRLSCAASGYILPMGWYRQAPGKEREFVASIDAGSITYYADSVKGRFTISRDNAKNTVYLQMNSLKPEDTAVYYCAAKDVVPTNHIYWGQGTQVTVSS

SEQ ID NO: 40147 - protein, 118 aa, Artificial Sequence
  Chemically Synthesized
QVQLQESGGGLVQAGGSLRLSCAASGTISYTDDMGWYRQAPGKEREFVAAISYGASTNYADSVKGRFTISRDNAKNTVYLQMNSLKPEDTAVYYCAASDRDRASHLYWGQGTQVTVSS

SEQ ID NO: 40148 - protein, 118 aa, Artificial Sequence
  Chemically Synthesized
QVQLQESGGGLVQAGGSLRLSCAASGTISYPWPMGWYRQAPGKEREFVAAINYGGTTNYADSVKGRFTISRDNAKNTVYLQMNSLKPEDTAVYYCAVYVDNGDVLSYWGQGTQVTVSS

SEQ ID NO: 40149 - protein, 118 aa, Artificial Sequence
  Chemically Synthesized
QVQLQESGGGLVQAGGSLRLSCAASGTIFLDYYMGWYRQAPGKEREFVATISPGSITYYADSVKGRFTISRDNAKNTVYLQMNSLKPEDTAVYYCAVFSGYTRYLDYWGQGTQVTVSS

SEQ ID NO: 40150 - protein, 117 aa, Artificial Sequence
  Chemically Synthesized
QVQLQESGGGLVQAGGSLRLSCAASGTIFRPVEMGWYRQAPGKERELVAGIADGASTNYADSVKGRFTISRDNAKNTVYLQMNSLKPEDTAVYYCAAKTTVYDSIYWGQGTQVTVSS

SEQ ID NO: 40151 - protein, 118 aa, Artificial Sequence
  Chemically Synthesized
QVQLQESGGGLVQAGGSLRLSCAASGSIFDGDYMGWYRQAPGKEREFVAGIAIGSITNYADSVKGRFTISRDNAKNTVYLQMNSLKPEDTAVYYCAVPAGWAVAYGYWGQGTQVTVSS

SEQ ID NO: 40152 - protein, 117 aa, Artificial Sequence
  Chemically Synthesized
QVQLQESGGGLVQAGGSLRLSCAASGSISSASVMGWYRQAPGKEREFVAGINVGTTTYYADSVKGRFTISRDNAKNTVYLQMNSLKPEDTAVYYCAVYVNTWSLIYWGQGTQVTVSS

SEQ ID NO: 40153 - protein, 118 aa, Artificial Sequence
  Chemically Synthesized
QVQLQESGGGLVQAGGSLRLSCAASGTISETGYMGWYRQAPGKERELVAAITYGANTYYADSVKGRFTISRDNAKNTVYLQMNSLKPEDTAVYYCAAQDVYRTGHYYWGQGTQVTVSS

SEQ ID NO: 40154 - protein, 122 aa, Artificial Sequence
  Chemically Synthesized
QVQLQESGGGLVQAGGSLRLSCAASGTIFLGPGMGWYRQAPGKERELVATITYGASTYYADSVKGRFTISRDNAKNTVYLQMNSLKPEDTAVYYCAVESIYYNYQDDDYAYWGQGTQVTVSS

SEQ ID NO: 40155 - protein, 117 aa, Artificial Sequence
  Chemically Synthesized
QVQLQESGGGLVQAGGSLRLSCAASGSISDDDPMGWYRQAPGKERELVAGIGYGAITNYADSVKGRFTISRDNAKNTVYLQMNSLKPEDTAVYYCAVRYTSRVNFYWGQGTQVTVSS

SEQ ID NO: 40156 - protein, 117 aa, Artificial Sequence
  Chemically Synthesized
QVQLQESGGGLVQAGGSLRLSCAASGYIFVAAYMGWYRQAPGKERELLPLLMTVVIPYADSVKGRFTISRDNAKNTVYLQMNSLKPEDTAVYYCAVRKRDVLGYDYWGQGTQVTVSS

SEQ ID NO: 40157 - protein, 124 aa, Artificial Sequence
  Chemically Synthesized
QVQLQESGGGLVQAGGSLRLSCAASGIFLLCTMGWYRQAPGKERELVASISAGGNTNYADSVKGRFTISRDNAKNTVYLQMNSLKPEDTAVYYCAADAGVSTFLTTLLVLSIYWGQGTQVTVSS

SEQ ID NO: 40158 - protein, 122 aa, Artificial Sequence
  Chemically Synthesized
QVQLQESGGGLVQAGGSLRLSCAASGNISGATRMGWYRQAPGKERELVAAITYGGTTYYADSVKGRFTISRDNAKNTVYLQMNSLKPEDTAVYYCAVELGNTFYYVPILNYWGQGTQVTVSS

SEQ ID NO: 40159 - protein, 118 aa, Artificial Sequence
  Chemically Synthesized
QVQLQESGGGLVQAGGSLRLSCAASGYISWTIYMGWYRQAPGKERELVASIGPGSNTYYADSVKGRFTISRDNAKNTVYLQMNSLKPEDTAVYYCAVHVIQYAPYPYWGQGTQVTVSS

SEQ ID NO: 40160 - protein, 118 aa, Artificial Sequence
  Chemically Synthesized
QVQLQESGGGLVQAGGSLRLSCAASGTISSDGGMGWYRQAPGKEREFVAAITDGAITYYADSVKGRFTISRDNAKNTVYLQMNSLKPEDTAVYYCAVSDRATAQHYYWGQGTQVTVSS

SEQ ID NO: 40161 - protein, 126 aa, Artificial Sequence
  Chemically Synthesized
QVQLQESGGGLVQAGGSLRLSCAASGYIFDTGSMGWYRQAPGKERELVASIAVGAITYYADSVKGRFTISRDNAKNTVYLQMNSLKPEDTAVYYCAVPWQPQDYYAEQKKRTYRYWGQGTQVTVSS

SEQ ID NO: 40162 - protein, 112 aa, Artificial Sequence
  Chemically Synthesized
QVQLQESGGGLVQAGGSLRLSCAASGSIFQYLDMGWYRQAPGKEREFVATITRGTTTNYADSVKGRFTISRDNAKNTVYLQMNSLKPEDTAVYYCAALLIYWGQGTQVTVSS

SEQ ID NO: 40163 - protein, 126 aa, Artificial Sequence
  Chemically Synthesized
QVQLQESGGGLVQAGGSLRLSCAASGNIFDTRGMGWYRQAPGKERELVATISLGGITNYADSVKGRFTISRDNAKNTVYLQMNSLKPEDTAVYYCAVYRPTQYDNKGPTRIYYRYWGQGTQVTVSS

SEQ ID NO: 40164 - protein, 122 aa, Artificial Sequence
  Chemically Synthesized
QVQLQESGGGLVQAGGSLRLSCAASGNISHWYRMGWYRQAPGKEREFVAGIAPGTNTYYADSVKGRFTISRDNAKNTVYLQMNSLKPEDTAVYYCAAYYLSTVYGLYAYWYWGQGTQVTVSS

SEQ ID NO: 40165 - protein, 126 aa, Artificial Sequence
  Chemically Synthesized
QVQLQESGGGLVQAGGSLRLSCAASGTIFPYAYMGWYRQAPGKERELVAGIGQGGNTNYADSVKGRFTISRDNAKNTVYLQMNSLKPEDTAVYYCAAFWWGGLDGYNRWSRSHRYWGQGTQVTVSS

SEQ ID NO: 40166 - protein, 126 aa, Artificial Sequence
  Chemically Synthesized
QVQLQESGGGLVQAGGSLRLSCAASGTISTYIPMGWYRQAPGKERELVATISQGGNTNYADSVKGRFTISRDNAKNTVYLQMNSLKPEDTAVYYCAVANQARPSHGQGPTETYKYWGQGTQVTVSS

SEQ ID NO: 40167 - protein, 122 aa, Artificial Sequence
  Chemically Synthesized
QVQLQESGGGLVQAGGSLRLSCAASGYISERLYMGWYRQAPGKERELVAAIAKGGTTNYADSVKGRFTISRDNAKNTVYLQMNSLKPEDTAVYYCAVYVDYISTWYDYHRYWGQGTQVTVSS

SEQ ID NO: 40168 - protein, 126 aa, Artificial Sequence
  Chemically Synthesized
QVQLQESGGGLVQAGGSLRLSCAASGTISYAAWMGWYRQAPGKERELVAAITLGATTNYADSVKGRFTISRDNAKNTVYLQMNSLKPEDTAVYYCAARGGTTDRSVSGYYWFFGYWGQGTQVTVSS

SEQ ID NO: 40169 - protein, 118 aa, Artificial Sequence
  Chemically Synthesized
QVQLQESGGGLVQAGGSLRLSCAASGTISSTVHMGWYRQAPGKEREFVAAITTGASTNYADSVKGRFTISRDNAKNTVYLQMNSLKPEDTAVYYCAATTYVKYAHYYWGQGTQVTVSS

SEQ ID NO: 40170 - protein, 114 aa, Artificial Sequence
  Chemically Synthesized
QVQLQESGGGLVQAGGSLRLSCAASGNLWMGWYRQAPGKEREFVATINDGGSTYYADSVKGRFTISRDNAKNTVYLQMNSLKPEDTAVYYCAAYYRSGGDLRYWGQGTQVTVSS

SEQ ID NO: 40171 - protein, 117 aa, Artificial Sequence
  Chemically Synthesized
QVQLQESGGGLVQAGGSLRLSCAASGSISHEGGMGWYRQAPGKEREFVAAINYGGITYYADSVKGRFTISRDNAKNTVYLQMNSLKPEDTAVYYCAATYEYSSLIYWGQGTQVTVSS

SEQ ID NO: 40172 - protein, 126 aa, Artificial Sequence
  Chemically Synthesized
QVQLQESGGGLVQAGGSLRLSCAASGNIFGYRLMGWYRQAPGKERELVAGISRGSTTYYADSVKGRFTISRDNAKNTVYLQMNSLKPEDTAVYYCAAGRYGYDRDDGDGGGYYRYWGQGTQVTVSS

SEQ ID NO: 40173 - protein, 116 aa, Artificial Sequence
  Chemically Synthesized
QVQLQESGGGLVQAGGSLRLSCAASGYISVRRVMGWYRQAPGKEREFAITAGASTNYADSVKGRFTISRDNAKNTVYLQMNSLKPEDTAVYYCAVDGPDEDAFDYWGQGTQVTVSS

SEQ ID NO: 40174 - protein, 109 aa, Artificial Sequence
  Chemically Synthesized
QVQLQESGGGLVQAGGSLRLSCAASGSISPVYNMGWYRQAPGKERELVAGIDAGAITNYADSVKGRFTISRDNAKNTVYLQMNSLKPEDTAVYYCAAYWGQGTQVTVSS

SEQ ID NO: 40175 - protein, 113 aa, Artificial Sequence
  Chemically Synthesized
QVQLQESGGGLVQAGGSLRLSCAASGSISVYAPMGWYRQAPGKEREFVAGIGDGASTNYADSVKGRFTISRDNAKNTVYLQMNSLKPEDTAVYYCASGLPFYWGQGTQVTVSS

SEQ ID NO: 40176 - protein, 118 aa, Artificial Sequence
  Chemically Synthesized
QVQLQESGGGLVQAGGSLRLSCAASGSISLYQPMGWYRQAPGKEREFVAAINYGSITNYADSVKGRFTISRDNAKNTVYLQMNSLKPEDTAVYYCAAGYVARRYYYYWGQGTQVTVSS

SEQ ID NO: 40177 - protein, 125 aa, Artificial Sequence
  Chemically Synthesized
QVQLQESGGGLVQAGGSLRLSCAASGLFLLTTMGWYRQAPGKEREFVASITDGANTNYADSVKGRFTISRDNAKNTVYLQMNSLKPEDTAVYYCAVNGADYAYVTDYAFRWHYYWGQGTQVTVSS

SEQ ID NO: 40178 - protein, 121 aa, Artificial Sequence
  Chemically Synthesized
QVQLQESGGGLVQAGGSLRLSCAASGTISSTDYMGWYRQAPGKEREFVASITWGAITNYADSVKGRFTISRDNAKNTVYLQMNSLKPEDTAVYYCAVTYDLHYVSREHGYWGQGTQVTVSS

SEQ ID NO: 40179 - protein, 116 aa, Artificial Sequence
  Chemically Synthesized
QVQLQESGGGLVQAGGSLRLSCAASGTISYTWYMGWYRQAPGKERELVAAITWGSNTYYADSVKGRFTISRDNAKNTVYLQMNSLKPEDTAVYYCAAYYYDYLYYWGQGTQVTVSS

SEQ ID NO: 40180 - protein, 123 aa, Artificial Sequence
  Chemically Synthesized
QVQLQESGGGLVQAGGSLRLSCAASGNISDYWADMGWYRQAPGKERELVAAIARGGNTNYADSVKGRFTISRDNAKNTVYLQMNSLKPEDTAVYYCAVNWPYDSNYFVEFGYWGQGTQVTVSS

SEQ ID NO: 40181 - protein, 121 aa, Artificial Sequence
  Chemically Synthesized
QVQLQESGGGLVQAGGSLRLSCAASGYIFPVSYMGWYRQAPGKEREFVAGIAAGANTNYADSVKGRFTISRDNAKNTVYLQMNSLKPEDTAVYYCAAEFGASTSLLTTFYWGQGTQVTVSS

SEQ ID NO: 40182 - protein, 122 aa, Artificial Sequence
  Chemically Synthesized
QVQLQESGGGLVQAGGSLRLSCAASGTIFVYIWMGWYRQAPGKERELVASIDSGSTTYYADSVKGRFTISRDNAKNTVYLQMNSLKPEDTAVYYCAAVGYHSYQYWSDHSYWGQGTQVTVSS

SEQ ID NO: 40183 - protein, 110 aa, Artificial Sequence
  Chemically Synthesized
QVQLQESGGGLVQAGGSLRLSCAASGTIFDSNTMGWYRQAPGKERELVAGIDIGGTTNYADSVKGRFTISRDNAKNTVYLQMNSLKPEDTAVYYCADTYWGQGTQVTVSS

SEQ ID NO: 40184 - protein, 118 aa, Artificial Sequence
  Chemically Synthesized
QVQLQESGGGLVQAGGSLRLSCAASGTISAQYTMGWYRQAPGKERELVATINNGGNTNYADSVKGRFTISRDNAKNTVYLQMNSLKPEDTAVYYCAVETKERGTHTYWGQGTQVTVSS

SEQ ID NO: 40185 - protein, 125 aa, Artificial Sequence
  Chemically Synthesized
QVQLQESGGGLVQAGGSLRLSCAASGTIFTRYMGWYRQAPGKERELVAGIAYGSTTNYADSVKGRFTISRDNAKNTVYLQMNSLKPEDTAVYYCAAYTDSVGTPGYYTDRSHWYWGQGTQVTVSS

SEQ ID NO: 40186 - protein, 118 aa, Artificial Sequence
  Chemically Synthesized
QVQLQESGGGLVQAGGSLRLSCAASGNISYYVGMGWYRQAPGKERELVATIDYGGNTNYADSVKGRFTISRDNAKNTVYLQMNSLKPEDTAVYYCAVLRFTDNYLEYWGQGTQVTVSS

SEQ ID NO: 40187 - protein, 120 aa, Artificial Sequence
  Chemically Synthesized
QVQLQESGGGLVQAGGSLRLSCAASGYIFSCLMGWYRQAPGKEREFVATIAYGTTTYYADSVKGRFTISRDNAKNTVYLQMNSLKPEDTAVYYCAADVPLPPRSAGLAYWGQGTQVTVSS

SEQ ID NO: 40188 - protein, 118 aa, Artificial Sequence
  Chemically Synthesized
QVQLQESGGGLVQAGGSLRLSCAASGTIFWRDYMGWYRQAPGKERELVATIAYGTTTYYADSVKGRFTISRDNAKNTVYLQMNSLKPEDTAVYYCAVKGDPWHDLAYWGQGTQVTVSS

SEQ ID NO: 40189 - protein, 112 aa, Artificial Sequence
  Chemically Synthesized
QVQLQESGGGLVQAGGSLRLSCAASGYIFGSDAMGWYRQAPGKERELVAAIAPGGTTYYADSVKGRFTISRDNAKNTVYLQMNSLKPEDTAVYYCAVQASYWGQGTQVTVSS

SEQ ID NO: 40190 - protein, 125 aa, Artificial Sequence
  Chemically Synthesized
QVQLQESGGGLVQAGGSLRLSCAASGTISYRDQMGWYRQAPGKERELVAGIGLGATTNYADSVKGRFTISRDNAKNTVYLQMNSLKPEDTAVYYCAAYWVPYLWARERPRVLLYWGQGTQVTVSS

SEQ ID NO: 40191 - protein, 115 aa, Artificial Sequence
  Chemically Synthesized
QVQLQESGGGLVQAGGSLRLSCAASGSISDAIYMGWYRQAPGKERELVVLIPYADSVKGRFTISRDNAKNTVYLQMNSLKPEDTAVYYCAVDSLTLVGVLVGFYWGQGTQVTVSS

SEQ ID NO: 40192 - protein, 121 aa, Artificial Sequence
  Chemically Synthesized
QVQLQESGGGLVQAGGSLRLSCAASGYIFYGDDMGWYRQAPGKERELVASINYGTTTNYADSVKGRFTISRDNAKNTVYLQMNSLKPEDTAVYYCAALVTDAYSGPYDHYWGQGTQVTVSS

SEQ ID NO: 40193 - protein, 126 aa, Artificial Sequence
  Chemically Synthesized
QVQLQESGGGLVQAGGSLRLSCAASGSISSSNSMGWYRQAPGKERELVAAINSGGTTNYADSVKGRFTISRDNAKNTVYLQMNSLKPEDTAVYYCAAQYDVVNAKRRIGAYDLLYWGQGTQVTVSS

SEQ ID NO: 40194 - protein, 117 aa, Artificial Sequence
  Chemically Synthesized
QVQLQESGGGLVQAGGSLRLSCAASGTISYDNWMGWYRQAPGKEREFVAGMCWWYYQYADSVKGRFTISRDNAKNTVYLQMNSLKPEDTAVYYCAVKIDLPEGHYYWGQGTQVTVSS

SEQ ID NO: 40195 - protein, 118 aa, Artificial Sequence
  Chemically Synthesized
QVQLQESGGGLVQAGGSLRLSCAASGNIFRIWDMGWYRQAPGKEREFVAAIGYGGNTNYADSVKGRFTISRDNAKNTVYLQMNSLKPEDTAVYYCAADWDGKGKHYYWGQGTQVTVSS

SEQ ID NO: 40196 - protein, 117 aa, Artificial Sequence
  Chemically Synthesized
QVQLQESGGGLVQAGGSLRLSCAASGTIFRPNTMGWYRQAPGKERELVAAIDPGSNTYADSVKGRFTISRDNAKNTVYLQMNSLKPEDTAVYYCAAEPWPKWQYGYWGQGTQVTVSS

SEQ ID NO: 40197 - protein, 122 aa, Artificial Sequence
  Chemically Synthesized
QVQLQESGGGLVQAGGSLRLSCAASGTIFAAGGMGWYRQAPGKEREFVAGIGDGTSTYYADSVKGRFTISRDNAKNTVYLQMNSLKPEDTAVYYCAVDHDYGLVAGVDYAYWGQGTQVTVSS

SEQ ID NO: 40198 - protein, 122 aa, Artificial Sequence
  Chemically Synthesized
QVQLQESGGGLVQAGGSLRLSCAASGTISVDNTMGWYRQAPGKEREFVAAIARGASTYYADSVKGRFTISRDNAKNTVYLQMNSLKPEDTAVYYCAARYVPEGYYTYDHDYWGQGTQVTVSS

SEQ ID NO: 40199 - protein, 114 aa, Artificial Sequence
  Chemically Synthesized
QVQLQESGGGLVQAGGSLRLSCAASGSIFRTTMGWYRQAPGKERELVAGINDGTTTNYADSVKGRFTISRDNAKNTVYLQMNSLKPEDTAVYYCAVTVTVNIYWGQGTQVTVSS

SEQ ID NO: 40200 - protein, 117 aa, Artificial Sequence
  Chemically Synthesized
QVQLQESGGGLVQAGGSLRLSCAASGSISHPDYMGWYRQAPGKERELVAAINDGGTTYYADSVKGRFTISRDNAKNTVYLQMNSLKPEDTAVYYCAVYDRVVSLMYWGQGTQVTVSS

SEQ ID NO: 40201 - protein, 120 aa, Artificial Sequence
  Chemically Synthesized
QVQLQESGGGLVQAGGSLRLSCAASGYISRVGYMGWYRQAPGKERELVATIGRGTITNYADSVKGRFTISRDNAKNTVYLQMNSLKPEDTAVYYCAAWQWYSYYHWLVYWGQGTQVTVSS

SEQ ID NO: 40202 - protein, 122 aa, Artificial Sequence
  Chemically Synthesized
QVQLQESGGGLVQAGGSLRLSCAASGYIFGPADMGWYRQAPGKERELVAAINQGGSTYYADSVKGRFTISRDNAKNTVYLQMNSLKPEDTAVYYCAVGYIYGVYPAVLHYYWGQGTQVTVSS

SEQ ID NO: 40203 - protein, 122 aa, Artificial Sequence
  Chemically Synthesized
QVQLQESGGGLVQAGGSLRLSCAASGSISITTNMGWYRQAPGKERELVATIAYGGNTYYADSVKGRFTISRDNAKNTVYLQMNSLKPEDTAVYYCAVTVYYGGTAQSALGYWGQGTQVTVSS

SEQ ID NO: 40204 - protein, 122 aa, Artificial Sequence
  Chemically Synthesized
QVQLQESGGGLVQAGGSLRLSCAASGYIFYGTTMGWYRQAPGKEREFVASIGGGGTTNYADSVKGRFTISRDNAKNTVYLQMNSLKPEDTAVYYCAVYHYGYVTGYRYLKYWGQGTQVTVSS

SEQ ID NO: 40205 - protein, 118 aa, Artificial Sequence
  Chemically Synthesized
QVQLQESGGGLVQAGGSLRLSCAASGNIFSVYYMGWYRQAPGKERELVAAIGGGSSTNYADSVKGRFTISRDNAKNTVYLQMNSLKPEDTAVYYCAVTTDFIYALNYWGQGTQVTVSS

SEQ ID NO: 40206 - protein, 118 aa, Artificial Sequence
  Chemically Synthesized
QVQLQESGGGLVQAGGSLRLSCAASGNIFGRGDMGWYRQAPGKERELVATITPGTSTNYADSVKGRFTISRDNAKNTVYLQMNSLKPEDTAVYYCAAANYHGRTYRYWGQGTQVTVSS

SEQ ID NO: 40207 - protein, 118 aa, Artificial Sequence
  Chemically Synthesized
QVQLQESGGGLVQAGGSLRLSCAASGTISPAYGMGWYRQAPGKEREFVASIGNGGTTYYADSVKGRFTISRDNAKNTVYLQMNSLKPEDTAVYYCAVYAYSPYTHAYWGQGTQVTVSS

SEQ ID NO: 40208 - protein, 119 aa, Artificial Sequence
  Chemically Synthesized
QVQLQESGGGLVQAGGSLRLSCAASGSISYYTYMGWYRQAPGKERELVAAISYGGASTYYADSVKGRFTISRDNAKNTVYLQMNSLKPEDTAVYYCAAYLYLVSRHYYWGQGTQVTVSS

SEQ ID NO: 40209 - protein, 110 aa, Artificial Sequence
  Chemically Synthesized
QVQLQESGGGLVQAGGSLRLSCAASGNISTSGIMGWYRQAPGKERELVATYADSVKGRFTISRDNAKNTVYLQMNSLKPEDTAVYYCAVGLNYNYAHSYWGQGTQVTVSS

SEQ ID NO: 40210 - protein, 126 aa, Artificial Sequence
  Chemically Synthesized
QVQLQESGGGLVQAGGSLRLSCAASGTISLLIIMGWYRQAPGKERELVATINQGGTTNYADSVKGRFTISRDNAKNTVYLQMNSLKPEDTAVYYCAAGRVPSGVYWFDRVGQFAYWGQGTQVTVSS

SEQ ID NO: 40211 - protein, 120 aa, Artificial Sequence
  Chemically Synthesized
QVQLQESGGGLVQAGGSLRLSCAASGLMGWYRQAPGKEREFVAAIDYGTITNYADSVKGRFTISRDNAKNTVYLQMNSLKPEDTAVYYCAVQQYWKWHSQIYGSQWFDYWGQGTQVTVSS

SEQ ID NO: 40212 - protein, 118 aa, Artificial Sequence
  Chemically Synthesized
QVQLQESGGGLVQAGGSLRLSCAASGNISTPWLMGWYRQAPGKERELVAAIDGGGTTNYADSVKGRFTISRDNAKNTVYLQMNSLKPEDTAVYYCATWFYVVVQLYYWGQGTQVTVSS

SEQ ID NO: 40213 - protein, 126 aa, Artificial Sequence
  Chemically Synthesized
QVQLQESGGGLVQAGGSLRLSCAASGNISYAYPMGWYRQAPGKEREFVAGIDTGSNTYYADSVKGRFTISRDNAKNTVYLQMNSLKPEDTAVYYCAVWARGPITGDWPLTRVHYYWGQGTQVTVSS

SEQ ID NO: 40214 - protein, 126 aa, Artificial Sequence
  Chemically Synthesized
QVQLQESGGGLVQAGGSLRLSCAASGSISGPSPMGWYRQAPGKEREFVATISYGTSTNYADSVKGRFTISRDNAKNTVYLQMNSLKPEDTAVYYCAVHYTDSVFDKTRRYVYFTYWGQGTQVTVSS

SEQ ID NO: 40215 - protein, 126 aa, Artificial Sequence
  Chemically Synthesized
QVQLQESGGGLVQAGGSLRLSCAASGYISADWRMGWYRQAPGKEREFVASIAYGTNTYYADSVKGRFTISRDNAKNTVYLQMNSLKPEDTAVYYCAVTYAAYRGGGERYAWQHGYWGQGTQVTVSS

SEQ ID NO: 40216 - protein, 122 aa, Artificial Sequence
  Chemically Synthesized
QVQLQESGGGLVQAGGSLRLSCAASGSISNQYPMGWYRQAPGKERELVATIDAGASTYYADSVKGRFTISRDNAKNTVYLQMNSLKPEDTAVYYCAVTDYAGGSTPIRHSYWGQGTQVTVSS

SEQ ID NO: 40217 - protein, 122 aa, Artificial Sequence
  Chemically Synthesized
QVQLQESGGGLVQAGGSLRLSCAASGTIFHDLYMGWYRQAPGKERELVATIGGGATTYYADSVKGRFTISRDNAKNTVYLQMNSLKPEDTAVYYCAANPDWGSTYYSEHYYWGQGTQVTVSS

SEQ ID NO: 40218 - protein, 117 aa, Artificial Sequence
  Chemically Synthesized
QVQLQESGGGLVQAGGSLRLSCAASGTISIGEDMGWYRQAPGKERELVAGMLTVVVPYADSVKGRFTISRDNAKNTVYLQMNSLKPEDTAVYYCAADPTDYYYYNYWGQGTQVTVSS

SEQ ID NO: 40219 - protein, 121 aa, Artificial Sequence
  Chemically Synthesized
QVQLQESGGGLVQAGGSLRLSCAASGTISQEIYMGWYRQAPGKERELVATIADGSSTYYADSVKGRFTISRDNAKNTVYLQMNSLKPEDTAVYYCAVVGREATFRGGSIYWGQGTQVTVSS

SEQ ID NO: 40220 - protein, 121 aa, Artificial Sequence
  Chemically Synthesized
QVQLQESGGGLVQAGGSLRLSCAASGSIFAIDSMGWYRQAPGKERELVASITGGGITNYADSVKGRFTISRDNAKNTVYLQMNSLKPEDTAVYYCAVDPPPVIARTRTMYWGQGTQVTVSS

SEQ ID NO: 40221 - protein, 118 aa, Artificial Sequence
  Chemically Synthesized
QVQLQESGGGLVQAGGSLRLSCAASGTISIDRHMGWYRQAPGKEREFVAAIAQGSITYYADSVKGRFTISRDNAKNTVYLQMNSLKPEDTAVYYCAVVAEIRSYLTYWGQGTQVTVSS

SEQ ID NO: 40222 - protein, 117 aa, Artificial Sequence
  Chemically Synthesized
QVQLQESGGGLVQAGGSLRLSCAASGIFSVLFMGWYRQAPGKERELVAGIDNGSNTNYADSVKGRFTISRDNAKNTVYLQMNSLKPEDTAVYYCAASYIVRNLHGYWGQGTQVTVSS

SEQ ID NO: 40223 - protein, 122 aa, Artificial Sequence
  Chemically Synthesized
QVQLQESGGGLVQAGGSLRLSCAASGNIFKLHAMGWYRQAPGKEREFVAAIAAGASTYYADSVKGRFTISRDNAKNTVYLQMNSLKPEDTAVYYCAAAYPYKTRPPYIYEYWGQGTQVTVSS

SEQ ID NO: 40224 - protein, 121 aa, Artificial Sequence
  Chemically Synthesized
QVQLQESGGGLVQAGGSLRLSCAASGNISADTMGWYRQAPGKEREFVASITQGTTTYYADSVKGRFTISRDNAKNTVYLQMNSLKPEDTAVYYCAVYLAPYRDAYYYYEYWGQGTQVTVSS

SEQ ID NO: 40225 - protein, 118 aa, Artificial Sequence
  Chemically Synthesized
QVQLQESGGGLVQAGGSLRLSCAASGSISLSPYMGWYRQAPGKERELVASISDGANTYYADSVKGRFTISRDNAKNTVYLQMNSLKPEDTAVYYCAATDAGIDGYKYWGQGTQVTVSS

SEQ ID NO: 40226 - protein, 114 aa, Artificial Sequence
  Chemically Synthesized
QVQLQESGGGLVQAGGSLRLSCAASGNIFWFLRMGWYRQAPGKEREFVAGIGDGGTTYYADSVKGRFTISRDNAKNTVYLQMNSLKPEDTAVYYCAWYILYLYWGQGTQVTVSS

SEQ ID NO: 40227 - protein, 121 aa, Artificial Sequence
  Chemically Synthesized
QVQLQESGGGLVQAGGSLRLSCAASGSIFGGGHMGWYRQAPGKERELVAAIADGGTTNYADSVKGRFTISRDNAKNTVYLQMNSLKPEDTAVYYCAALASDGDTSTDTIYWGQGTQVTVSS

SEQ ID NO: 40228 - protein, 126 aa, Artificial Sequence
  Chemically Synthesized
QVQLQESGGGLVQAGGSLRLSCAASGSISRRYFMGWYRQAPGKERELVATIGGGGSTNYADSVKGRFTISRDNAKNTVYLQMNSLKPEDTAVYYCAARLGGLSDPPSYHWGELSYWGQGTQVTVSS

SEQ ID NO: 40229 - protein, 126 aa, Artificial Sequence
  Chemically Synthesized
QVQLQESGGGLVQAGGSLRLSCAASGSISSDYWMGWYRQAPGKEREFVATIDKGATTYYADSVKGRFTISRDNAKNTVYLQMNSLKPEDTAVYYCAVEAYIPYTYLSYRGAYYGYWGQGTQVTVSS

SEQ ID NO: 40230 - protein, 118 aa, Artificial Sequence
  Chemically Synthesized
QVQLQESGGGLVQAGGSLRLSCAASGNISQHYYMGWYRQAPGKERELVASINDGSNTYYADSVKGRFTISRDNAKNTVYLQMNSLKPEDTAVYYCAVYSAHAPYHGYWGQGTQVTVSS

SEQ ID NO: 40231 - protein, 117 aa, Artificial Sequence
  Chemically Synthesized
QVQLQESGGGLVQAGGSLRLSCAASGSIFIKSAMGWYRQAPGKERELVAGINGGTTNYADSVKGRFTISRDNAKNTVYLQMNSLKPEDTAVYYCAVADLGHTVLAYWGQGTQVTVSS

SEQ ID NO: 40232 - protein, 118 aa, Artificial Sequence
  Chemically Synthesized
QVQLQESGGGLVQAGGSLRLSCAASGNISPDIGMGWYRQAPGKERELVAAINGGGITNYADSVKGRFTISRDNAKNTVYLQMNSLKPEDTAVYYCAVYYSVRGGFAYWGQGTQVTVSS

SEQ ID NO: 40233 - protein, 118 aa, Artificial Sequence
  Chemically Synthesized
QVQLQESGGGLVQAGGSLRLSCAASGNIFPDSSMGWYRQAPGKERELVAAITPGTTTNYADSVKGRFTISRDNAKNTVYLQMNSLKPEDTAVYYCAVYYVTYYQLYYWGQGTQVTVSS

SEQ ID NO: 40234 - protein, 122 aa, Artificial Sequence
  Chemically Synthesized
QVQLQESGGGLVQAGGSLRLSCAASGNISGYYLMGWYRQAPGKERELVASIGEGTTTNYADSVKGRFTISRDNAKNTVYLQMNSLKPEDTAVYYCAVYLDLVQFATVPFRYWGQGTQVTVSS

SEQ ID NO: 40235 - protein, 118 aa, Artificial Sequence
  Chemically Synthesized
QVQLQESGGGLVQAGGSLRLSCAASGTISVSRYMGWYRQAPGKEREFVAGIDDGASTYYADSVKGRFTISRDNAKNTVYLQMNSLKPEDTAVYYCAADLTDYPQHYYWGQGTQVTVSS

SEQ ID NO: 40236 - protein, 118 aa, Artificial Sequence
  Chemically Synthesized
QVQLQESGGGLVQAGGSLRLSCAASGNISRVYGMGWYRQAPGKERELVASIDYGGITYYADSVKGRFTISRDNAKNTVYLQMNSLKPEDTAVYYCAAASTYRRYLAYWGQGTQVTVSS

SEQ ID NO: 40237 - protein, 116 aa, Artificial Sequence
  Chemically Synthesized
QVQLQESGGGLVQAGGSLRLSCAASGNTSGPMGWYRQAPGKERELVAGITNGSTTYYADSVKGRFTISRDNAKNTVYLQMNSLKPEDTAVYYCAAARTGYVALYYWGQGTQVTVSS

SEQ ID NO: 40238 - protein, 121 aa, Artificial Sequence
  Chemically Synthesized
QVQLQESGGGLVQAGGSLRLSCAASGTILTVTMGWYRQAPGKERELVAAINYGANTNYADSVKGRFTISRDNAKNTVYLQMNSLKPEDTAVYYCAVYDPYRYSYIRYYRYWGQGTQVTVSS

SEQ ID NO: 40239 - protein, 111 aa, Artificial Sequence
  Chemically Synthesized
QVQLQESGGGLVQAGGSLRLSCAASGNIFTPPTMGWYRQAPGKERELVASIAYGSSTYYADSVKGRFTISRDNAKNTVYLQMNSLKPEDTAVYYCAYFRYWGQGTQVTVSS

SEQ ID NO: 40240 - protein, 117 aa, Artificial Sequence
  Chemically Synthesized
QVQLQESGGGLVQAGGSLRLSCAASGTIFTRYPMGWYRQAPGKEREFVASIAYGTSTYYADSVKGRFTISRDNAKNTVYLQMNSLKPEDTAVYYCAVSTTNVGTMYWGQGTQVTVSS

SEQ ID NO: 40241 - protein, 126 aa, Artificial Sequence
  Chemically Synthesized
QVQLQESGGGLVQAGGSLRLSCAASGYISYGYYMGWYRQAPGKERELVAGIASVVLPYADSVKGRFTISRDNAKNTVYLQMNSLKPEDTAVYYCAVWSPDYTVQDWSYTVDRYIYWGQGTQVTVSS

SEQ ID NO: 40242 - protein, 122 aa, Artificial Sequence
  Chemically Synthesized
QVQLQESGGGLVQAGGSLRLSCAASGTIFRTAYMGWYRQAPGKERELVAAITWGGTTYYADSVKGRFTISRDNAKNTVYLQMNSLKPEDTAVYYCAVIWYINGVTWNRYDYWGQGTQVTVSS

SEQ ID NO: 40243 - protein, 121 aa, Artificial Sequence
  Chemically Synthesized
QVQLQESGGGLVQAGGSLRLSCAASGNISYYEAMGWYRQAPGKERELLPVLMTVLVPYADSVKGRFTISRDNAKNTVYLQMNSLKPEDTAVYYCAVNVYLLGTWVRYHIYWGQGTQVTVSS

SEQ ID NO: 40244 - protein, 118 aa, Artificial Sequence
  Chemically Synthesized
QVQLQESGGGLVQAGGSLRLSCAASGSIFGQDYMGWYRQAPGKEREFVATIASGTITYYADSVKGRFTISRDNAKNTVYLQMNSLKPEDTAVYYCAVNAAETAGLLYWGQGTQVTVSS

SEQ ID NO: 40245 - protein, 114 aa, Artificial Sequence
  Chemically Synthesized
QVQLQESGGGLVQAGGSLRLSCAASGTISYLQSMGWYRQAPGKEREFVAAIIPYADSVKGRFTISRDNAKNTVYLQMNSLKPEDTAVYYCAALYYYAYRPTQYWGQGTQVTVSS

SEQ ID NO: 40246 - protein, 118 aa, Artificial Sequence
  Chemically Synthesized
QVQLQESGGGLVQAGGSLRLSCAASGYIFGAGTMGWYRQAPGKERELVAAIDRGANTYYADSVKGRFTISRDNAKNTVYLQMNSLKPEDTAVYYCAVRRRAYRGHNYWGQGTQVTVSS

SEQ ID NO: 40247 - protein, 122 aa, Artificial Sequence
  Chemically Synthesized
QVQLQESGGGLVQAGGSLRLSCAASGTIFGTRQMGWYRQAPGKERELVAAIAQGSTTYYADSVKGRFTISRDNAKNTVYLQMNSLKPEDTAVYYCAAGQYGSYRAYVGHPYWGQGTQVTVSS

SEQ ID NO: 40248 - protein, 122 aa, Artificial Sequence
  Chemically Synthesized
QVQLQESGGGLVQAGGSLRLSCAASGNISYNDYMGWYRQAPGKERELVAAIGDGATTNYADSVKGRFTISRDNAKNTVYLQMNSLKPEDTAVYYCAANEFTDRYPGHYHGYWGQGTQVTVSS

SEQ ID NO: 40249 - protein, 118 aa, Artificial Sequence
  Chemically Synthesized
QVQLQESGGGLVQAGGSLRLSCAASGSISVSTMGWYRQAPGKEREFVASIGIGGNTNYADSVKGRFTISRDNAKNTVYLQMNSLKPEDTAVYYCAYLQSADYATYAYWGQGTQVTVSS

SEQ ID NO: 40250 - protein, 118 aa, Artificial Sequence
  Chemically Synthesized
QVQLQESGGGLVQAGGSLRLSCAASGSISADGSMGWYRQAPGKEREFVATIDSGSITNYADSVKGRFTISRDNAKNTVYLQMNSLKPEDTAVYYCAVYYIVAGTFSYWGQGTQVTVSS

SEQ ID NO: 40251 - protein, 121 aa, Artificial Sequence
  Chemically Synthesized
QVQLQESGGGLVQAGGSLRLSCAASGSISPRYLMGWYRQAPGKERELVATISYGGSTYYADSVKGRFTISRDNAKNTVYLQMNSLKPEDTAVYYCAAYPYHNDSTTTLMYWGQGTQVTVSS

SEQ ID NO: 40252 - protein, 122 aa, Artificial Sequence
  Chemically Synthesized
QVQLQESGGGLVQAGGSLRLSCAASGTIFYPRDMGWYRQAPGKERELVATIGPGGITNYADSVKGRFTISRDNAKNTVYLQMNSLKPEDTAVYYCAAYDGPSVYAYPSFKYWGQGTQVTVSS

SEQ ID NO: 40253 - protein, 118 aa, Artificial Sequence
  Chemically Synthesized
QVQLQESGGGLVQAGGSLRLSCAASGTISDYPDMGWYRQAPGKEREFVASIDRGTNTNYADSVKGRFTISRDNAKNTVYLQMNSLKPEDTAVYYCAVVSALEQYLSYWGQGTQVTVSS

SEQ ID NO: 40254 - protein, 125 aa, Artificial Sequence
  Chemically Synthesized
QVQLQESGGGLVQAGGSLRLSCAASGTISRLHYMGWYRQAPGKEREFVAGIDNGTSTYYADSVKGRFTISRDNAKNTVYLQMNSLKPEDTAVYYCAAIGWLGISVLCGRHFFWYWGQGTQVTVSS

SEQ ID NO: 40255 - protein, 122 aa, Artificial Sequence
  Chemically Synthesized
QVQLQESGGGLVQAGGSLRLSCAASGTIFYERAMGWYRQAPGKEREFVAAITAGTNTYYADSVKGRFTISRDNAKNTVYLQMNSLKPEDTAVYYCAAVTTDYDEEAWIYDYWGQGTQVTVSS

SEQ ID NO: 40256 - protein, 118 aa, Artificial Sequence
  Chemically Synthesized
QVQLQESGGGLVQAGGSLRLSCAASGNISSGQTMGWYRQAPGKEREFVASIADGASTNYADSVKGRFTISRDNAKNTVYLQMNSLKPEDTAVYYCAARYQGDDYYQYWGQGTQVTVSS

SEQ ID NO: 40257 - protein, 122 aa, Artificial Sequence
  Chemically Synthesized
QVQLQESGGGLVQAGGSLRLSCAASGYISIYPDMGWYRQAPGKERELVAAIGYGTTTYYADSVKGRFTISRDNAKNTVYLQMNSLKPEDTAVYYCAVAGRSPAQEAYDFNYWGQGTQVTVSS

SEQ ID NO: 40258 - protein, 122 aa, Artificial Sequence
  Chemically Synthesized
QVQLQESGGGLVQAGGSLRLSCAASGNIFDNTSMGWYRQAPGKEREFVASIAQGATTNYADSVKGRFTISRDNAKNTVYLQMNSLKPEDTAVYYCAVTRRFDDRRVRFHGYWGQGTQVTVSS

SEQ ID NO: 40259 - protein, 122 aa, Artificial Sequence
  Chemically Synthesized
QVQLQESGGGLVQAGGSLRLSCAASGSIFDRALMGWYRQAPGKEREFVAAIDQGSNTYYADSVKGRFTISRDNAKNTVYLQMNSLKPEDTAVYYCAVIRVYTTVYGDYYGYWGQGTQVTVSS

SEQ ID NO: 40260 - protein, 125 aa, Artificial Sequence
  Chemically Synthesized
QVQLQESGGGLVQAGGSLRLSCAASGYISFSSAMGWYRQAPGKERELVAAITGGTTYYADSVKGRFTISRDNAKNTVYLQMNSLKPEDTAVYYCAARDDWKYRITYTYDRYHSYWGQGTQVTVSS

SEQ ID NO: 40261 - protein, 122 aa, Artificial Sequence
  Chemically Synthesized
QVQLQESGGGLVQAGGSLRLSCAASGNIFYAYKMGWYRQAPGKERELVAAIGQGSITYYADSVKGRFTISRDNAKNTVYLQMNSLKPEDTAVYYCAARYPSHPYIVTWHIYWGQGTQVTVSS

SEQ ID NO: 40262 - protein, 113 aa, Artificial Sequence
  Chemically Synthesized
QVQLQESGGGLVQAGGSLRLSCAASGYISRDSYMGWYRQAPGKEREFVATIASGAITYYADSVKGRFTISRDNAKNTVYLQMNSLKPEDTAVYYCAAYDLGYWGQGTQVTVSS

SEQ ID NO: 40263 - protein, 118 aa, Artificial Sequence
  Chemically Synthesized
QVQLQESGGGLVQAGGSLRLSCAASGTISVTSRMGWYRQAPGKERELVASIDYGSNTNYADSVKGRFTISRDNAKNTVYLQMNSLKPEDTAVYYCAVTYYAYYVYWYWGQGTQVTVSS

SEQ ID NO: 40264 - protein, 118 aa, Artificial Sequence
  Chemically Synthesized
QVQLQESGGGLVQAGGSLRLSCAASGNISVTLRMGWYRQAPGKEREFVATISWGSNTYYADSVKGRFTISRDNAKNTVYLQMNSLKPEDTAVYYCAVRWGFSDVLGYWGQGTQVTVSS

SEQ ID NO: 40265 - protein, 122 aa, Artificial Sequence
  Chemically Synthesized
QVQLQESGGGLVQAGGSLRLSCAASGNISHGWVMGWYRQAPGKERELVAAIAQGTTTYYADSVKGRFTISRDNAKNTVYLQMNSLKPEDTAVYYCAARLADHERVAYYYAYWGQGTQVTVSS

SEQ ID NO: 40266 - protein, 126 aa, Artificial Sequence
  Chemically Synthesized
QVQLQESGGGLVQAGGSLRLSCAASGTISDLSDMGWYRQAPGKEREFVATITYGSTTNYADSVKGRFTISRDNAKNTVYLQMNSLKPEDTAVYYCAVDDYYPPWLNGDDQTDFGYWGQGTQVTVSS

SEQ ID NO: 40267 - protein, 116 aa, Artificial Sequence
  Chemically Synthesized
QVQLQESGGGLVQAGGSLRLSCAASGSILLTTMGWYRQAPGKERELVASISIGANTNYADSVKGRFTISRDNAKNTVYLQMNSLKPEDTAVYYCAVQHGDIYSLYWGQGTQVTVSS

SEQ ID NO: 40268 - protein, 121 aa, Artificial Sequence
  Chemically Synthesized
QVQLQESGGGLVQAGGSLRLSCAASGTIFPRYMGWYRQAPGKEREFVAAINYGGTTNYADSVKGRFTISRDNAKNTVYLQMNSLKPEDTAVYYCAARPQDVYEYTVYHVYWGQGTQVTVSS

SEQ ID NO: 40269 - protein, 126 aa, Artificial Sequence
  Chemically Synthesized
QVQLQESGGGLVQAGGSLRLSCAASGNISGFNYMGWYRQAPGKERELVAAIAFGTSTNYADSVKGRFTISRDNAKNTVYLQMNSLKPEDTAVYYCAVYGDYGGGGYRYVPSTHDYWGQGTQVTVSS

SEQ ID NO: 40270 - protein, 118 aa, Artificial Sequence
  Chemically Synthesized
QVQLQESGGGLVQAGGSLRLSCAASGNIFIIVYMGWYRQAPGKEREFVASIDKGGSTYYADSVKGRFTISRDNAKNTVYLQMNSLKPEDTAVYYCAARSHYGTDYYYWGQGTQVTVSS

SEQ ID NO: 40271 - protein, 117 aa, Artificial Sequence
  Chemically Synthesized
QVQLQESGGGLVQAGGSLRLSCAASGNISPLTSMGWYRQAPGKERELLPLLVVVVLPYADSVKGRFTISRDNAKNTVYLQMNSLKPEDTAVYYCAAEYLITANLGYWGQGTQVTVSS

SEQ ID NO: 40272 - protein, 117 aa, Artificial Sequence
  Chemically Synthesized
QVQLQESGGGLVQAGGSLRLSCAASGNILTTVMGWYRQAPGKERELVAAIAGGANTYYADSVKGRFTISRDNAKNTVYLQMNSLKPEDTAVYYCAVDLPFRGYHDYWGQGTQVTVSS

SEQ ID NO: 40273 - protein, 118 aa, Artificial Sequence
  Chemically Synthesized
QVQLQESGGGLVQAGGSLRLSCAASGSIFLPYKMGWYRQAPGKEREFVATIARGASTNYADSVKGRFTISRDNAKNTVYLQMNSLKPEDTAVYYCAADPRDDDIHPYWGQGTQVTVSS

SEQ ID NO: 40274 - protein, 125 aa, Artificial Sequence
  Chemically Synthesized
QVQLQESGGGLVQAGGSLRLSCAASGSISRRPMGWYRQAPGKERELVATIDDGTTTNYADSVKGRFTISRDNAKNTVYLQMNSLKPEDTAVYYCAVRSPYYPYTYDVQDVFHAYWGQGTQVTVSS

SEQ ID NO: 40275 - protein, 117 aa, Artificial Sequence
  Chemically Synthesized
QVQLQESGGGLVQAGGSLRLSCAASGNIFGSLMGWYRQAPGKERELVATITAGGTTYYADSVKGRFTISRDNAKNTVYLQMNSLKPEDTAVYYCAAIPTLTRGHDYWGQGTQVTVSS

SEQ ID NO: 40276 - protein, 125 aa, Artificial Sequence
  Chemically Synthesized
QVQLQESGGGLVQAGGSLRLSCAASGSIFYSYMGWYRQAPGKEREFVATIADGTNTNYADSVKGRFTISRDNAKNTVYLQMNSLKPEDTAVYYCAVPFAERYPIHADRYDDYGYWGQGTQVTVSS

SEQ ID NO: 40277 - protein, 118 aa, Artificial Sequence
  Chemically Synthesized
QVQLQESGGGLVQAGGSLRLSCAASGYISRTWSMGWYRQAPGKEREFVAAITGGASTYYADSVKGRFTISRDNAKNTVYLQMNSLKPEDTAVYYCAASKRVSRTHYYWGQGTQVTVSS

SEQ ID NO: 40278 - protein, 118 aa, Artificial Sequence
  Chemically Synthesized
QVQLQESGGGLVQAGGSLRLSCAASGNIFRDFAMGWYRQAPGKEREFVASIDTGGITYYADSVKGRFTISRDNAKNTVYLQMNSLKPEDTAVYYCAAWHLYVRDFQYWGQGTQVTVSS

SEQ ID NO: 40279 - protein, 122 aa, Artificial Sequence
  Chemically Synthesized
QVQLQESGGGLVQAGGSLRLSCAASGYIFANATMGWYRQAPGKERELVASIDHGSSTYYADSVKGRFTISRDNAKNTVYLQMNSLKPEDTAVYYCAAYVAANDGTGLTHDYWGQGTQVTVSS

SEQ ID NO: 40280 - protein, 122 aa, Artificial Sequence
  Chemically Synthesized
QVQLQESGGGLVQAGGSLRLSCAASGTIFRDYFMGWYRQAPGKEREFVAAIDTGSTTYYADSVKGRFTISRDNAKNTVYLQMNSLKPEDTAVYYCAVDSPVAPYLHQTYWYWGQGTQVTVSS

SEQ ID NO: 40281 - protein, 122 aa, Artificial Sequence
  Chemically Synthesized
QVQLQESGGGLVQAGGSLRLSCAASGTISRWYYMGWYRQAPGKEREFVAGIDYGGNTYYADSVKGRFTISRDNAKNTVYLQMNSLKPEDTAVYYCAVSTTRYGQYYGVHYYWGQGTQVTVSS

SEQ ID NO: 40282 - protein, 118 aa, Artificial Sequence
  Chemically Synthesized
QVQLQESGGGLVQAGGSLRLSCAASGYISYANYMGWYRQAPGKEREFVAGISAGASTYYADSVKGRFTISRDNAKNTVYLQMNSLKPEDTAVYYCAVTQDTEGGHYYWGQGTQVTVSS

SEQ ID NO: 40283 - protein, 122 aa, Artificial Sequence
  Chemically Synthesized
QVQLQESGGGLVQAGGSLRLSCAASGTIFRDYVMGWYRQAPGKERELVAAIDYGATTYYADSVKGRFTISRDNAKNTVYLQMNSLKPEDTAVYYCAADGIKPFRSIASHYYWGQGTQVTVSS

SEQ ID NO: 40284 - protein, 118 aa, Artificial Sequence
  Chemically Synthesized
QVQLQESGGGLVQAGGSLRLSCAASGNISNYRFMGWYRQAPGKERELVASIASGANTYYADSVKGRFTISRDNAKNTVYLQMNSLKPEDTAVYYCAVGYYDYGYLAYWGQGTQVTVSS

SEQ ID NO: 40285 - protein, 118 aa, Artificial Sequence
  Chemically Synthesized
QVQLQESGGGLVQAGGSLRLSCAASGNISDTYYMGWYRQAPGKERELVATISGGATTYYADSVKGRFTISRDNAKNTVYLQMNSLKPEDTAVYYCAVGLRRGQAHSYWGQGTQVTVSS

SEQ ID NO: 40286 - protein, 120 aa, Artificial Sequence
  Chemically Synthesized
QVQLQESGGGLVQAGGSLRLSCAASGSISYDSMGWYRQAPGKERELVAAIDSGGSTYYADSVKGRFTISRDNAKNTVYLQMNSLKPEDTAVYYCAAWYGGSVRTLTVIYWGQGTQVTVSS

SEQ ID NO: 40287 - protein, 119 aa, Artificial Sequence
  Chemically Synthesized
QVQLQESGGGLVQAGGSLRLSCAASGLFLLKLMGWYRQAPGKEREFVASIDPGAITNYADSVKGRFTISRDNAKNTVYLQMNSLKPEDTAVYYCAVYYYYSARSDDLYWGQGTQVTVSS

SEQ ID NO: 40288 - protein, 111 aa, Artificial Sequence
  Chemically Synthesized
QVQLQESGGGLVQAGGSLRLSCAASGSISYHTYMGWYRQAPGKERELVAGISAGTITYYADSVKGRFTISRDNAKNTVYLQMNSLKPEDTAVYYCANYPYWGQGTQVTVSS

SEQ ID NO: 40289 - protein, 126 aa, Artificial Sequence
  Chemically Synthesized
QVQLQESGGGLVQAGGSLRLSCAASGNIFYLQVMGWYRQAPGKERELVAGINEGTTTNYADSVKGRFTISRDNAKNTVYLQMNSLKPEDTAVYYCAAVTQDYVLDWYRAQPFHDYWGQGTQVTVSS

SEQ ID NO: 40290 - protein, 117 aa, Artificial Sequence
  Chemically Synthesized
QVQLQESGGGLVQAGGSLRLSCAASGTIFAPNVMGWYRQAPGKEREFVATIATGGTTNYADSVKGRFTISRDNAKNTVYLQMNSLKPEDTAVYYCAADGFVDRSLYWGQGTQVTVSS

SEQ ID NO: 40291 - protein, 117 aa, Artificial Sequence
  Chemically Synthesized
QVQLQESGGGLVQAGGSLRLSCAASGNIFSFNAMGWYRQAPGKEREFVASIDIGSITYYADSVKGRFTISRDNAKNTVYLQMNSLKPEDTAVYYCAVGPYYDGHYYWGQGTQVTVSS

SEQ ID NO: 40292 - protein, 118 aa, Artificial Sequence
  Chemically Synthesized
QVQLQESGGGLVQAGGSLRLSCAASGNISGLGAMGWYRQAPGKEREFVATISDGTITNYADSVKGRFTISRDNAKNTVYLQMNSLKPEDTAVYYCAVYAYNNDIHTYWGQGTQVTVSS

SEQ ID NO: 40293 - protein, 120 aa, Artificial Sequence
  Chemically Synthesized
QVQLQESGGGLVQAGGSLRLSCAASGYISAPDTMGWYRQAPGKEREFVASIDQGGNTNYADSVKGRFTISRDNAKNTVYLQMNSLKPEDTAVYYCAVGSRKLCLLTVIYWGQGTQVTVSS

SEQ ID NO: 40294 - protein, 110 aa, Artificial Sequence
  Chemically Synthesized
QVQLQESGGGLVQAGGSLRLSCAASGSIFPTIAMGWYRQAPGKEREFVAPYADSVKGRFTISRDNAKNTVYLQMNSLKPEDTAVYYCAANRYNYRTFVYWGQGTQVTVSS

SEQ ID NO: 40295 - protein, 118 aa, Artificial Sequence
  Chemically Synthesized
QVQLQESGGGLVQAGGSLRLSCAASGSIFADGYMGWYRQAPGKERELVASIASGSSTNYADSVKGRFTISRDNAKNTVYLQMNSLKPEDTAVYYCAADPYEYDIHPYWGQGTQVTVSS

SEQ ID NO: 40296 - protein, 118 aa, Artificial Sequence
  Chemically Synthesized
QVQLQESGGGLVQAGGSLRLSCAASGSIFLTVYMGWYRQAPGKEREFVASIADGSSTYYADSVKGRFTISRDNAKNTVYLQMNSLKPEDTAVYYCAATFLYGRYLAYWGQGTQVTVSS

SEQ ID NO: 40297 - protein, 122 aa, Artificial Sequence
  Chemically Synthesized
QVQLQESGGGLVQAGGSLRLSCAASGTIFDQAIMGWYRQAPGKERELVAGITGGAITYYADSVKGRFTISRDNAKNTVYLQMNSLKPEDTAVYYCAAFVYDYDNALSVLNYWGQGTQVTVSS

SEQ ID NO: 40298 - protein, 126 aa, Artificial Sequence
  Chemically Synthesized
QVQLQESGGGLVQAGGSLRLSCAASGSISVDRVMGWYRQAPGKEREFVAAITTGTNTNYADSVKGRFTISRDNAKNTVYLQMNSLKPEDTAVYYCAAYYQSDRDRVGRRGYHLQYWGQGTQVTVSS

SEQ ID NO: 40299 - protein, 122 aa, Artificial Sequence
  Chemically Synthesized
QVQLQESGGGLVQAGGSLRLSCAASGNIFLVNYMGWYRQAPGKERELVATIAYGAITYYADSVKGRFTISRDNAKNTVYLQMNSLKPEDTAVYYCAVRQDIYDLTDYYHEYWGQGTQVTVSS

SEQ ID NO: 40300 - protein, 121 aa, Artificial Sequence
  Chemically Synthesized
QVQLQESGGGLVQAGGSLRLSCAASGTISYGRYMGWYRQAPGKEREFVAAIGRGGITNYADSVKGRFTISRDNAKNTVYLQMNSLKPEDTAVYYCAVQLLSGLTTLTFMYWGQGTQVTVSS

SEQ ID NO: 40301 - protein, 122 aa, Artificial Sequence
  Chemically Synthesized
QVQLQESGGGLVQAGGSLRLSCAASGTIFAPSFMGWYRQAPGKEREFVAAIADGTSTYYADSVKGRFTISRDNAKNTVYLQMNSLKPEDTAVYYCAALRRGRHYRYDLHPYWGQGTQVTVSS

SEQ ID NO: 40302 - protein, 122 aa, Artificial Sequence
  Chemically Synthesized
QVQLQESGGGLVQAGGSLRLSCAASGSIFTAYIMGWYRQAPGKEREFVAGISDGSNTNYADSVKGRFTISRDNAKNTVYLQMNSLKPEDTAVYYCAAYLDVITIDVYRHEYWGQGTQVTVSS

SEQ ID NO: 40303 - protein, 118 aa, Artificial Sequence
  Chemically Synthesized
QVQLQESGGGLVQAGGSLRLSCAASGTISTNSTMGWYRQAPGKERELVASIAQGASTNYADSVKGRFTISRDNAKNTVYLQMNSLKPEDTAVYYCAVAYQADSWFSYWGQGTQVTVSS

SEQ ID NO: 40304 - protein, 118 aa, Artificial Sequence
  Chemically Synthesized
QVQLQESGGGLVQAGGSLRLSCAASGNIFPAGTMGWYRQAPGKERELVATINRGSNTNYADSVKGRFTISRDNAKNTVYLQMNSLKPEDTAVYYCAVGNTHRDGYNYWGQGTQVTVSS

SEQ ID NO: 40305 - protein, 118 aa, Artificial Sequence
  Chemically Synthesized
QVQLQESGGGLVQAGGSLRLSCAASGTISYYDFMGWYRQAPGKERELVATIDIGATTNYADSVKGRFTISRDNAKNTVYLQMNSLKPEDTAVYYCAAGAYYYQQYAYWGQGTQVTVSS

SEQ ID NO: 40306 - protein, 118 aa, Artificial Sequence
  Chemically Synthesized
QVQLQESGGGLVQAGGSLRLSCAASGYISYKTDMGWYRQAPGKERELVAAIGLGSTTNYADSVKGRFTISRDNAKNTVYLQMNSLKPEDTAVYYCAAGVRSYPRLVYWGQGTQVTVSS

SEQ ID NO: 40307 - protein, 118 aa, Artificial Sequence
  Chemically Synthesized
QVQLQESGGGLVQAGGSLRLSCAASGYISRKTAMGWYRQAPGKERELVAGIAVGASTYYADSVKGRFTISRDNAKNTVYLQMNSLKPEDTAVYYCAVYAGRGYDHTYWGQGTQVTVSS

SEQ ID NO: 40308 - protein, 126 aa, Artificial Sequence
  Chemically Synthesized
QVQLQESGGGLVQAGGSLRLSCAASGNIFGGVYMGWYRQAPGKEREFVAGISYGSTTNYADSVKGRFTISRDNAKNTVYLQMNSLKPEDTAVYYCAVAWLRYKTPDQDSDDYHNYWGQGTQVTVSS

SEQ ID NO: 40309 - protein, 126 aa, Artificial Sequence
  Chemically Synthesized
QVQLQESGGGLVQAGGSLRLSCAASGNIFHNQYMGWYRQAPGKERELVASISFGGSTYYADSVKGRFTISRDNAKNTVYLQMNSLKPEDTAVYYCAVANLTSRLVWTYYLGEHRYWGQGTQVTVSS

SEQ ID NO: 40310 - protein, 126 aa, Artificial Sequence
  Chemically Synthesized
QVQLQESGGGLVQAGGSLRLSCAASGTISSSAGMGWYRQAPGKERELVASIGHGGSTYYADSVKGRFTISRDNAKNTVYLQMNSLKPEDTAVYYCAVVPGTGVPWGEYVRVVYDYWGQGTQVTVSS

SEQ ID NO: 40311 - protein, 126 aa, Artificial Sequence
  Chemically Synthesized
QVQLQESGGGLVQAGGSLRLSCAASGNIFSSSYMGWYRQAPGKERELVASIATGASTYYADSVKGRFTISRDNAKNTVYLQMNSLKPEDTAVYYCAASGRIYPWADYGNALPYYYWGQGTQVTVSS

SEQ ID NO: 40312 - protein, 118 aa, Artificial Sequence
  Chemically Synthesized
QVQLQESGGGLVQAGGSLRLSCAASGNISSRYYMGWYRQAPGKEREFVASISSGTITYYADSVKGRFTISRDNAKNTVYLQMNSLKPEDTAVYYCAVDDPPFVTYYYWGQGTQVTVSS

SEQ ID NO: 40313 - protein, 118 aa, Artificial Sequence
  Chemically Synthesized
QVQLQESGGGLVQAGGSLRLSCAASGNIFTWTTMGWYRQAPGKEREFVATIGGGGITYYADSVKGRFTISRDNAKNTVYLQMNSLKPEDTAVYYCAVNFPWIYFFGYWGQGTQVTVSS

SEQ ID NO: 40314 - protein, 118 aa, Artificial Sequence
  Chemically Synthesized
QVQLQESGGGLVQAGGSLRLSCAASGSISVQEYMGWYRQAPGKEREFVAAISSGSNTYYADSVKGRFTISRDNAKNTVYLQMNSLKPEDTAVYYCAAGDRAVDFHVYWGQGTQVTVSS

SEQ ID NO: 40315 - protein, 122 aa, Artificial Sequence
  Chemically Synthesized
QVQLQESGGGLVQAGGSLRLSCAASGSISGTYSMGWYRQAPGKEREFVAGINTGANTYYADSVKGRFTISRDNAKNTVYLQMNSLKPEDTAVYYCAVIANELWPRTYWLWYWGQGTQVTVSS

SEQ ID NO: 40316 - protein, 122 aa, Artificial Sequence
  Chemically Synthesized
QVQLQESGGGLVQAGGSLRLSCAASGTISPLSYMGWYRQAPGKERELVATISLGTNTYYADSVKGRFTISRDNAKNTVYLQMNSLKPEDTAVYYCAVDDYRQYRADLDFRYWGQGTQVTVSS

SEQ ID NO: 40317 - protein, 118 aa, Artificial Sequence
  Chemically Synthesized
QVQLQESGGGLVQAGGSLRLSCAASGNIFTDDDMGWYRQAPGKERELVAGIDEGTNTNYADSVKGRFTISRDNAKNTVYLQMNSLKPEDTAVYYCAVHVNRDGDLHYWGQGTQVTVSS

SEQ ID NO: 40318 - protein, 113 aa, Artificial Sequence
  Chemically Synthesized
QVQLQESGGGLVQAGGSLRLSCAASGNIFVPEGMGWYRQAPGKEREFVASIDGGGITNYADSVKGRFTISRDNAKNTVYLQMNSLKPEDTAVYYCAANDYDYWGQGTQVTVSS

SEQ ID NO: 40319 - protein, 118 aa, Artificial Sequence
  Chemically Synthesized
QVQLQESGGGLVQAGGSLRLSCAASGNIFVTYYMGWYRQAPGKERELVATIGNGTNTYYADSVKGRFTISRDNAKNTVYLQMNSLKPEDTAVYYCAVRSQENSRYAYWGQGTQVTVSS

SEQ ID NO: 40320 - protein, 121 aa, Artificial Sequence
  Chemically Synthesized
QVQLQESGGGLVQAGGSLRLSCAASGYIFDRDYMGWYRQAPGKERELVASISYGAITNYADSVKGRFTISRDNAKNTVYLQMNSLKPEDTAVYYCAVDVYSIAYSSTLFYWGQGTQVTVSS

SEQ ID NO: 40321 - protein, 122 aa, Artificial Sequence
  Chemically Synthesized
QVQLQESGGGLVQAGGSLRLSCAASGSISRWFWMGWYRQAPGKEREFVAGIDSGGITNYADSVKGRFTISRDNAKNTVYLQMNSLKPEDTAVYYCAADVDISVYLDTGYYYWGQGTQVTVSS

SEQ ID NO: 40322 - protein, 118 aa, Artificial Sequence
  Chemically Synthesized
QVQLQESGGGLVQAGGSLRLSCAASGTIFTPRSMGWYRQAPGKEREFVAAIDDGSTTNYADSVKGRFTISRDNAKNTVYLQMNSLKPEDTAVYYCAATLSQDLVYPYWGQGTQVTVSS

SEQ ID NO: 40323 - protein, 117 aa, Artificial Sequence
  Chemically Synthesized
QVQLQESGGGLVQAGGSLRLSCAASGTISDGLVMGWYRQAPGKERELVAAIDAGAITYYADSVKGRFTISRDNAKNTVYLQMNSLKPEDTAVYYCAAWQAYSRLGYWGQGTQVTVSS

SEQ ID NO: 40324 - protein, 118 aa, Artificial Sequence
  Chemically Synthesized
QVQLQESGGGLVQAGGSLRLSCAASGSIFYDSLMGWYRQAPGKEREFVAGITQGTNTYYADSVKGRFTISRDNAKNTVYLQMNSLKPEDTAVYYCAVWPGPRTYYAYWGQGTQVTVSS

SEQ ID NO: 40325 - protein, 117 aa, Artificial Sequence
  Chemically Synthesized
QVQLQESGGGLVQAGGSLRLSCAASGNISQQPYMGWYRQAPGKERELVATINSGASTNYADSVKGRFTISRDNAKNTVYLQMNSLKPEDTAVYYCAVSDYDRKHYYWGQGTQVTVSS

SEQ ID NO: 40326 - protein, 109 aa, Artificial Sequence
  Chemically Synthesized
QVQLQESGGGLVQAGGSLRLSCAASGTISYVYTMGWYRQAPGKEREFVASIAYGASTYYADSVKGRFTISRDNAKNTVYLQMNSLKPEDTAVYYCAVYWGQGTQVTVSS

SEQ ID NO: 40327 - protein, 126 aa, Artificial Sequence
  Chemically Synthesized
QVQLQESGGGLVQAGGSLRLSCAASGTIFYQVCMGWYRQAPGKERELVATIDRGGSTNYADSVKGRFTISRDNAKNTVYLQMNSLKPEDTAVYYCAAYRSPYSASSLTLDRLHPYWGQGTQVTVSS

SEQ ID NO: 40328 - protein, 125 aa, Artificial Sequence
  Chemically Synthesized
QVQLQESGGGLVQAGGSLRLSCAASGYIFVTSGMGWYRQAPGKEREFVASINTGASTNYADSVKGRFTISRDNAKNTVYLQMNSLKPEDTAVYYCAAGSLYHDESVTDLDDSMYWGQGTQVTVSS

SEQ ID NO: 40329 - protein, 122 aa, Artificial Sequence
  Chemically Synthesized
QVQLQESGGGLVQAGGSLRLSCAASGYISTDSRMGWYRQAPGKERELVAAIAYGSTTYYADSVKGRFTISRDNAKNTVYLQMNSLKPEDTAVYYCAAIGLRYPDAPEQYGYWGQGTQVTVSS

SEQ ID NO: 40330 - protein, 118 aa, Artificial Sequence
  Chemically Synthesized
QVQLQESGGGLVQAGGSLRLSCAASGSISTAFIMGWYRQAPGKERELVATIDDGSSTNYADSVKGRFTISRDNAKNTVYLQMNSLKPEDTAVYYCAAFTATTYGLTYWGQGTQVTVSS

SEQ ID NO: 40331 - protein, 122 aa, Artificial Sequence
  Chemically Synthesized
QVQLQESGGGLVQAGGSLRLSCAASGNIFVLNGMGWYRQAPGKEREFVATIGEGGNTYYADSVKGRFTISRDNAKNTVYLQMNSLKPEDTAVYYCAVGLAWDPYVTYAFVYWGQGTQVTVSS

SEQ ID NO: 40332 - protein, 120 aa, Artificial Sequence
  Chemically Synthesized
QVQLQESGGGLVQAGGSLRLSCAASGSISGDRYYMGWYRQAPGKERELVAAINAGASTNYADSVKGRFTISRDNAKNTVYLQMNSLKPEDTAVYYCAAYYRNTGYQVIYWGQGTQVTVSS

SEQ ID NO: 40333 - protein, 118 aa, Artificial Sequence
  Chemically Synthesized
QVQLQESGGGLVQAGGSLRLSCAASGYISRLYGMGWYRQAPGKERELVAAIDYGATTNYADSVKGRFTISRDNAKNTVYLQMNSLKPEDTAVYYCAARPDQGGALGYWGQGTQVTVSS

SEQ ID NO: 40334 - protein, 122 aa, Artificial Sequence
  Chemically Synthesized
QVQLQESGGGLVQAGGSLRLSCAASGNISTDVDMGWYRQAPGKERELVAGIAIGANTYYADSVKGRFTISRDNAKNTVYLQMNSLKPEDTAVYYCAALTAGTQYGHSSLLYWGQGTQVTVSS

SEQ ID NO: 40335 - protein, 120 aa, Artificial Sequence
  Chemically Synthesized
QVQLQESGGGLVQAGGSLRLSCAASGNISYLYMGWYRQAPGKERELVATITPGGTTNYADSVKGRFTISRDNAKNTVYLQMNSLKPEDTAVYYCAVDAYTYPELFATIYWGQGTQVTVSS

SEQ ID NO: 40336 - protein, 122 aa, Artificial Sequence
  Chemically Synthesized
QVQLQESGGGLVQAGGSLRLSCAASGNISHYDSMGWYRQAPGKERELVASIALGAITYYADSVKGRFTISRDNAKNTVYLQMNSLKPEDTAVYYCAADYPNVYTGGGLLHYWGQGTQVTVSS

SEQ ID NO: 40337 - protein, 125 aa, Artificial Sequence
  Chemically Synthesized
QVQLQESGGGLVQAGGSLRLSCAASGNIFARGEMGWYRQAPGKERELLPLLITVLLPYADSVKGRFTISRDNAKNTVYLQMNSLKPEDTAVYYCAAGYPRYVYIAPRDWAGHYYWGQGTQVTVSS

SEQ ID NO: 40338 - protein, 121 aa, Artificial Sequence
  Chemically Synthesized
QVQLQESGGGLVQAGGSLRLSCAASGTISHDVGMGWYRQAPGKERELLPVLVTVLLPYADSVKGRFTISRDNAKNTVYLQMNSLKPEDTAVYYCAVGNYDENLVRGYLQYWGQGTQVTVSS

SEQ ID NO: 40339 - protein, 118 aa, Artificial Sequence
  Chemically Synthesized
QVQLQESGGGLVQAGGSLRLSCAASGYIFKAYPMGWYRQAPGKEREFVATIASGASTYYADSVKGRFTISRDNAKNTVYLQMNSLKPEDTAVYYCAVDKTSAREHDYWGQGTQVTVSS

SEQ ID NO: 40340 - protein, 121 aa, Artificial Sequence
  Chemically Synthesized
QVQLQESGGGLVQAGGSLRLSCAASGSIFPDTYMGWYRQAPGKEREFVPLLLWVVLPYADSVKGRFTISRDNAKNTVYLQMNSLKPEDTAVYYCAVTPYPEDGWRHSHGYWGQGTQVTVSS

SEQ ID NO: 40341 - protein, 117 aa, Artificial Sequence
  Chemically Synthesized
QVQLQESGGGLVQAGGSLRLSCAASGTIFGRDAMGWYRQAPGKEREFCRYYWWWYYQYADSVKGRFTISRDNAKNTVYLQMNSLKPEDTAVYYCAVGLGPGYAHTYWGQGTQVTVSS

SEQ ID NO: 40342 - protein, 118 aa, Artificial Sequence
  Chemically Synthesized
QVQLQESGGGLVQAGGSLRLSCAASGSIFFYRAMGWYRQAPGKERELVASISHGSTTNYADSVKGRFTISRDNAKNTVYLQMNSLKPEDTAVYYCAVPQGTDQRLIYWGQGTQVTVSS

SEQ ID NO: 40343 - protein, 117 aa, Artificial Sequence
  Chemically Synthesized
QVQLQESGGGLVQAGGSLRLSCAASGTIFSGYMGWYRQAPGKERELVASITLGGSTYYADSVKGRFTISRDNAKNTVYLQMNSLKPEDTAVYYCAAKDGYTTGLRYWGQGTQVTVSS

SEQ ID NO: 40344 - protein, 126 aa, Artificial Sequence
  Chemically Synthesized
QVQLQESGGGLVQAGGSLRLSCAASGSISDDGAMGWYRQAPGKERELVATISGGANTNYADSVKGRFTISRDNAKNTVYLQMNSLKPEDTAVYYCAAIEDDDSQIYGLYNFGHGYWGQGTQVTVSS

SEQ ID NO: 40345 - protein, 118 aa, Artificial Sequence
  Chemically Synthesized
QVQLQESGGGLVQAGGSLRLSCAASGNISADDQMGWYRQAPGKEREFVATISYGSNTYYADSVKGRFTISRDNAKNTVYLQMNSLKPEDTAVYYCAVEDYAGQSHQYWGQGTQVTVSS

SEQ ID NO: 40346 - protein, 123 aa, Artificial Sequence
  Chemically Synthesized
QVQLQESGGGLVQAGGSLRLSCAASGSIFGSSMGWYRQAPGKEREFVAAIEGGSTNYADSVKGRFTISRDNAKNTVYLQMNSLKPEDTAVYYCAAPYLILDSPYSYPDSLFYWGQGTQVTVSS

SEQ ID NO: 40347 - protein, 117 aa, Artificial Sequence
  Chemically Synthesized
QVQLQESGGGLVQAGGSLRLSCAASGNISFLQDMGWYRQAPGKEREFVAAIGSVLVPYADSVKGRFTISRDNAKNTVYLQMNSLKPEDTAVYYCAADIFLSYGHYYWGQGTQVTVSS

SEQ ID NO: 40348 - protein, 118 aa, Artificial Sequence
  Chemically Synthesized
QVQLQESGGGLVQAGGSLRLSCAASGNIFGDSSMGWYRQAPGKEREFVASITSGGNTNYADSVKGRFTISRDNAKNTVYLQMNSLKPEDTAVYYCAAYPTLTEGHGYWGQGTQVTVSS

SEQ ID NO: 40349 - protein, 117 aa, Artificial Sequence
  Chemically Synthesized
QVQLQESGGGLVQAGGSLRLSCAASGNISPYPSMGWYRQAPGKERELVASIDGGTSTNYADSVKGRFTISRDNAKNTVYLQMNSLKPEDTAVYYCALGTMTCTTMYWGQGTQVTVSS

SEQ ID NO: 40350 - protein, 118 aa, Artificial Sequence
  Chemically Synthesized
QVQLQESGGGLVQAGGSLRLSCAASGTISPAYAMGWYRQAPGKERELVAAITYGGNTYYADSVKGRFTISRDNAKNTVYLQMNSLKPEDTAVYYCAAWKRYYHYFGYWGQGTQVTVSS

SEQ ID NO: 40351 - protein, 122 aa, Artificial Sequence
  Chemically Synthesized
QVQLQESGGGLVQAGGSLRLSCAASGSISGQYRMGWYRQAPGKEREFVASIARGGNTNYADSVKGRFTISRDNAKNTVYLQMNSLKPEDTAVYYCAADSPIPYFGLVYHDYWGQGTQVTVSS

SEQ ID NO: 40352 - protein, 122 aa, Artificial Sequence
  Chemically Synthesized
QVQLQESGGGLVQAGGSLRLSCAASGNISYNYSMGWYRQAPGKERELVATIGPGTSTNYADSVKGRFTISRDNAKNTVYLQMNSLKPEDTAVYYCAAASYGSRWLLDRYLYWGQGTQVTVSS

SEQ ID NO: 40353 - protein, 122 aa, Artificial Sequence
  Chemically Synthesized
QVQLQESGGGLVQAGGSLRLSCAASGSISGLALMGWYRQAPGKEREFVAGIAYGGSTYYADSVKGRFTISRDNAKNTVYLQMNSLKPEDTAVYYCAVYAAVGVPYWNFHVYWGQGTQVTVSS

SEQ ID NO: 40354 - protein, 121 aa, Artificial Sequence
  Chemically Synthesized
QVQLQESGGGLVQAGGSLRLSCAASGNIFDNQYMGWYRQAPGKEREFVAAIADGAITNYADSVKGRFTISRDNAKNTVYLQMNSLKPEDTAVYYCAAYPSKSLLTLTCMYWGQGTQVTVSS

SEQ ID NO: 40355 - protein, 126 aa, Artificial Sequence
  Chemically Synthesized
QVQLQESGGGLVQAGGSLRLSCAASGTIFDAFEMGWYRQAPGKERELVATITGGTITNYADSVKGRFTISRDNAKNTVYLQMNSLKPEDTAVYYCAVLPTGNGTSVVDSRSNYQYWGQGTQVTVSS

SEQ ID NO: 40356 - protein, 118 aa, Artificial Sequence
  Chemically Synthesized
QVQLQESGGGLVQAGGSLRLSCAASGNISVRRRMGWYRQAPGKERELVATISTGSITNYADSVKGRFTISRDNAKNTVYLQMNSLKPEDTAVYYCAVRTTYYRYFRYWGQGTQVTVSS

SEQ ID NO: 40357 - protein, 118 aa, Artificial Sequence
  Chemically Synthesized
QVQLQESGGGLVQAGGSLRLSCAASGSISQPNDMGWYRQAPGKEREFVAAIAVGSTTYYADSVKGRFTISRDNAKNTVYLQMNSLKPEDTAVYYCAATYAPDTRHTYWGQGTQVTVSS

SEQ ID NO: 40358 - protein, 124 aa, Artificial Sequence
  Chemically Synthesized
QVQLQESGGGLVQAGGSLRLSCAASGTISYVDGMGWYRQAPGKEREFVASIGSGTITNYADSVKGRFTISRDNAKNTVYLQMNSLKPEDTAVYYCAAYPATKWRYEYWGYHYYWGQGTQVTVSS

SEQ ID NO: 40359 - protein, 118 aa, Artificial Sequence
  Chemically Synthesized
QVQLQESGGGLVQAGGSLRLSCAASGYIFYPAWMGWYRQAPGKERELVASIGYGATTYYADSVKGRFTISRDNAKNTVYLQMNSLKPEDTAVYYCAANYVRYRSHSYWGQGTQVTVSS

SEQ ID NO: 40360 - protein, 116 aa, Artificial Sequence
  Chemically Synthesized
QVQLQESGGGLVQAGGSLRLSCAASGSISDVNWMGWYRQAPGKERELVAAIASGGTTNYADSVKGRFTISRDNAKNTVYLQMNSLKPEDTAVYYCALTKVLRRLYWGQGTQVTVSS

SEQ ID NO: 40361 - protein, 117 aa, Artificial Sequence
  Chemically Synthesized
QVQLQESGGGLVQAGGSLRLSCAASGTISSDVSMGWYRQAPGKERELVASIVRVLVPYADSVKGRFTISRDNAKNTVYLQMNSLKPEDTAVYYCAAAFWDALGHNYWGQGTQVTVSS

SEQ ID NO: 40362 - protein, 118 aa, Artificial Sequence
  Chemically Synthesized
QVQLQESGGGLVQAGGSLRLSCAASGYISIQSEMGWYRQAPGKEREFVAGIAYGAITYYADSVKGRFTISRDNAKNTVYLQMNSLKPEDTAVYYCAVVGTYLSAFGYWGQGTQVTVSS

SEQ ID NO: 40363 - protein, 125 aa, Artificial Sequence
  Chemically Synthesized
QVQLQESGGGLVQAGGSLRLSCAASGYIFGARTMGWYRQAPGKERELVASIGPGTSTYADSVKGRFTISRDNAKNTVYLQMNSLKPEDTAVYYCAVYANDSVLAVGAYPRHLTYWGQGTQVTVSS

SEQ ID NO: 40364 - protein, 118 aa, Artificial Sequence
  Chemically Synthesized
QVQLQESGGGLVQAGGSLRLSCAASGTISYSWDMGWYRQAPGKEREFVAGITLGSSTYYADSVKGRFTISRDNAKNTVYLQMNSLKPEDTAVYYCAVYYGYTSALLYWGQGTQVTVSS

SEQ ID NO: 40365 - protein, 118 aa, Artificial Sequence
  Chemically Synthesized
QVQLQESGGGLVQAGGSLRLSCAASGYISPDYYMGWYRQAPGKERELVAAIAVGGITNYADSVKGRFTISRDNAKNTVYLQMNSLKPEDTAVYYCAAQAVRPVLLSYWGQGTQVTVSS

SEQ ID NO: 40366 - protein, 118 aa, Artificial Sequence
  Chemically Synthesized
QVQLQESGGGLVQAGGSLRLSCAASGNISYHYYMGWYRQAPGKERELVAGIAYGTITNYADSVKGRFTISRDNAKNTVYLQMNSLKPEDTAVYYCAADLSYGGAFDYWGQGTQVTVSS

SEQ ID NO: 40367 - protein, 118 aa, Artificial Sequence
  Chemically Synthesized
QVQLQESGGGLVQAGGSLRLSCAASGYISIYSRMGWYRQAPGKEREFVAAITTGTSTYYADSVKGRFTISRDNAKNTVYLQMNSLKPEDTAVYYCAVYYVYDDTHWYWGQGTQVTVSS

SEQ ID NO: 40368 - protein, 115 aa, Artificial Sequence
  Chemically Synthesized
QVQLQESGGGLVQAGGSLRLSCAASGNISDGDYMGWYRQAPGKERELVASISWYYQYADSVKGRFTISRDNAKNTVYLQMNSLKPEDTAVYYCAAWSAYYYLDYWGQGTQVTVSS

SEQ ID NO: 40369 - protein, 121 aa, Artificial Sequence
  Chemically Synthesized
QVQLQESGGGLVQAGGSLRLSCAASGSISDERDMGWYRQAPGKERELVAGIADGTITNYADSVKGRFTISRDNAKNTVYLQMNSLKPEDTAVYYCAAGYRGDSTVGLSMYWGQGTQVTVSS

SEQ ID NO: 40370 - protein, 122 aa, Artificial Sequence
  Chemically Synthesized
QVQLQESGGGLVQAGGSLRLSCAASGSISPLRLMGWYRQAPGKERELVAAISTGGNTYYADSVKGRFTISRDNAKNTVYLQMNSLKPEDTAVYYCAARRTFVRYDYFRHGYWGQGTQVTVSS

SEQ ID NO: 40371 - protein, 117 aa, Artificial Sequence
  Chemically Synthesized
QVQLQESGGGLVQAGGSLRLSCAASGNIFRLGGMGWYRQAPGKEREFVAAIGSVLLPYADSVKGRFTISRDNAKNTVYLQMNSLKPEDTAVYYCAVGYYFDAGLVYWGQGTQVTVSS

SEQ ID NO: 40372 - protein, 118 aa, Artificial Sequence
  Chemically Synthesized
QVQLQESGGGLVQAGGSLRLSCAASGTIFSFDIMGWYRQAPGKEREFVAGIDYGGNTYYADSVKGRFTISRDNAKNTVYLQMNSLKPEDTAVYYCAAHGAYGDPHYYWGQGTQVTVSS

SEQ ID NO: 40373 - protein, 122 aa, Artificial Sequence
  Chemically Synthesized
QVQLQESGGGLVQAGGSLRLSCAASGNIFRQLNMGWYRQAPGKERELVASINLGATTNYADSVKGRFTISRDNAKNTVYLQMNSLKPEDTAVYYCAAVPYNRYVPGIYHGYWGQGTQVTVSS

SEQ ID NO: 40374 - protein, 118 aa, Artificial Sequence
  Chemically Synthesized
QVQLQESGGGLVQAGGSLRLSCAASGNISDPYDMGWYRQAPGKERELVATINFGTTTNYADSVKGRFTISRDNAKNTVYLQMNSLKPEDTAVYYCAVAGLSKVDHDYWGQGTQVTVSS

SEQ ID NO: 40375 - protein, 117 aa, Artificial Sequence
  Chemically Synthesized
QVQLQESGGGLVQAGGSLRLSCAASGYISAVGFMGWYRQAPGKERELVNYADSVKGRFTISRDNAKNTVYLQMNSLKPEDTAVYYCAAPDDRNQAYRYNPVTEFTYWGQGTQVTVSS

SEQ ID NO: 40376 - protein, 118 aa, Artificial Sequence
  Chemically Synthesized
QVQLQESGGGLVQAGGSLRLSCAASGNISGYYSMGWYRQAPGKERELVAGIARGSTTYYADSVKGRFTISRDNAKNTVYLQMNSLKPEDTAVYYCAVQRGVNYTHIYWGQGTQVTVSS

SEQ ID NO: 40377 - protein, 118 aa, Artificial Sequence
  Chemically Synthesized
QVQLQESGGGLVQAGGSLRLSCAASGNISDPDDMGWYRQAPGKEREFVATIAYGGTTYYADSVKGRFTISRDNAKNTVYLQMNSLKPEDTAVYYCAALSAYADVHRYWGQGTQVTVSS

SEQ ID NO: 40378 - protein, 122 aa, Artificial Sequence
  Chemically Synthesized
QVQLQESGGGLVQAGGSLRLSCAASGSISGFYSMGWYRQAPGKERELVATIATGATTNYADSVKGRFTISRDNAKNTVYLQMNSLKPEDTAVYYCAALKPTILLPKQYHEYWGQGTQVTVSS

SEQ ID NO: 40379 - protein, 115 aa, Artificial Sequence
  Chemically Synthesized
QVQLQESGGGLVQAGGSLRLSCAASGTIFRRRVMGWYRQAPGKERELVAAINRGATTYYADSVKGRFTISRDNAKNTVYLQMNSLKPEDTAVYYCAAYYRGLPYWGQGTQVTVSS

SEQ ID NO: 40380 - protein, 125 aa, Artificial Sequence
  Chemically Synthesized
QVQLQESGGGLVQAGGSLRLSCAASGNIFPSYVMGWYRQAPGKERELVAGIAAGGTTYYADSVKGRFTISRDNAKNTVYLQMNSLKPEDTAVYYCAVYYSSSYLDRYTYGAHLYWGQGTQVTVSS

SEQ ID NO: 40381 - protein, 118 aa, Artificial Sequence
  Chemically Synthesized
QVQLQESGGGLVQAGGSLRLSCAASGYIFNPRVMGWYRQAPGKEREFVAGISYGSTTNYADSVKGRFTISRDNAKNTVYLQMNSLKPEDTAVYYCAAGYFNHLTLRYWGQGTQVTVSS

SEQ ID NO: 40382 - protein, 117 aa, Artificial Sequence
  Chemically Synthesized
QVQLQESGGGLVQAGGSLRLSCAASGTISRAYDMGWYRQAPGKEREFVASISYGASTNYADSVKGRFTISRDNAKNTVYLQMNSLKPEDTAVYYCAANSLVIITIYWGQGTQVTVSS

SEQ ID NO: 40383 - protein, 121 aa, Artificial Sequence
  Chemically Synthesized
QVQLQESGGGLVQAGGSLRLSCAASGTIFYSNAMGWYRQAPGKERELVATIDLGSTTNYADSVKGRFTISRDNAKNTVYLQMNSLKPEDTAVYYCAAVFVKQLYEGSSMYWGQGTQVTVSS

SEQ ID NO: 40384 - protein, 118 aa, Artificial Sequence
  Chemically Synthesized
QVQLQESGGGLVQAGGSLRLSCAASGTIFAWEYMGWYRQAPGKERELVASIDEGTITNYADSVKGRFTISRDNAKNTVYLQMNSLKPEDTAVYYCAALRASWLYHNYWGQGTQVTVSS

SEQ ID NO: 40385 - protein, 117 aa, Artificial Sequence
  Chemically Synthesized
QVQLQESGGGLVQAGGSLRLSCAASGTISKTYMGWYRQAPGKERELVAGITYGSSTNYADSVKGRFTISRDNAKNTVYLQMNSLKPEDTAVYYCAVGRRPAELFYYWGQGTQVTVSS

SEQ ID NO: 40386 - protein, 124 aa, Artificial Sequence
  Chemically Synthesized
QVQLQESGGGLVQAGGSLRLSCAASGTIFTSDYMGWYRQAPGKERELVATISYGYQYADSVKGRFTISRDNAKNTVYLQMNSLKPEDTAVYYCAVKPWDRYGVDAGRPDDHYYWGQGTQVTVSS

SEQ ID NO: 40387 - protein, 117 aa, Artificial Sequence
  Chemically Synthesized
QVQLQESGGGLVQAGGSLRLSCAASGNIFSSTMGWYRQAPGKEREFVAGIASGTNTYYADSVKGRFTISRDNAKNTVYLQMNSLKPEDTAVYYCAVIDTYYIPYPYWGQGTQVTVSS

SEQ ID NO: 40388 - protein, 122 aa, Artificial Sequence
  Chemically Synthesized
QVQLQESGGGLVQAGGSLRLSCAASGNISDSTDMGWYRQAPGKERELVAAIAEGTSTYYADSVKGRFTISRDNAKNTVYLQMNSLKPEDTAVYYCAAYYRYVFYTYDYLVYWGQGTQVTVSS

SEQ ID NO: 40389 - protein, 122 aa, Artificial Sequence
  Chemically Synthesized
QVQLQESGGGLVQAGGSLRLSCAASGSIFDAYLMGWYRQAPGKEREFVASIAAGAITYYADSVKGRFTISRDNAKNTVYLQMNSLKPEDTAVYYCAVALASYDYVATYLTYWGQGTQVTVSS

SEQ ID NO: 40390 - protein, 118 aa, Artificial Sequence
  Chemically Synthesized
QVQLQESGGGLVQAGGSLRLSCAASGYIFDIYIMGWYRQAPGKEREFVASIDWGTTTYYADSVKGRFTISRDNAKNTVYLQMNSLKPEDTAVYYCAVWDAWGPAYAYWGQGTQVTVSS

SEQ ID NO: 40391 - protein, 121 aa, Artificial Sequence
  Chemically Synthesized
QVQLQESGGGLVQAGGSLRLSCAASGTISSRYYMGWYRQAPGKERELVASINGGAITYYADSVKGRFTISRDNAKNTVYLQMNSLKPEDTAVYYCAVYVNSPYVYQSHYYWGQGTQVTVSS

SEQ ID NO: 40392 - protein, 117 aa, Artificial Sequence
  Chemically Synthesized
QVQLQESGGGLVQAGGSLRLSCAASGSIYSERMGWYRQAPGKEREFVATIDSGGTTYYADSVKGRFTISRDNAKNTVYLQMNSLKPEDTAVYYCAVHNRYVKYLAYWGQGTQVTVSS

SEQ ID NO: 40393 - protein, 118 aa, Artificial Sequence
  Chemically Synthesized
QVQLQESGGGLVQAGGSLRLSCAASGNIFLYENMGWYRQAPGKEREFVAGIGYGTITNYADSVKGRFTISRDNAKNTVYLQMNSLKPEDTAVYYCAAESLSDGYLSYWGQGTQVTVSS

SEQ ID NO: 40394 - protein, 122 aa, Artificial Sequence
  Chemically Synthesized
QVQLQESGGGLVQAGGSLRLSCAASGNIFFAPGMGWYRQAPGKEREFVASIDGGANTNYADSVKGRFTISRDNAKNTVYLQMNSLKPEDTAVYYCAARAYRNTVASPSHGYWGQGTQVTVSS

SEQ ID NO: 40395 - protein, 118 aa, Artificial Sequence
  Chemically Synthesized
QVQLQESGGGLVQAGGSLRLSCAASGYIFRWYRMGWYRQAPGKEREFVASIGWGSITNYADSVKGRFTISRDNAKNTVYLQMNSLKPEDTAVYYCAAYFVGYRVHSYWGQGTQVTVSS

SEQ ID NO: 40396 - protein, 112 aa, Artificial Sequence
  Chemically Synthesized
QVQLQESGGGLVQAGGSLRLSCAASGSIFQQIMGWYRQAPGKERELVAGITAGSSTNYADSVKGRFTISRDNAKNTVYLQMNSLKPEDTAVYYCAVTNFLYWGQGTQVTVSS

SEQ ID NO: 40397 - protein, 117 aa, Artificial Sequence
  Chemically Synthesized
QVQLQESGGGLVQAGGSLRLSCAASGSISYQGYMGWYRQAPGKERELVAAIDGGGTTYYADSVKGRFTISRDNAKNTVYLQMNSLKPEDTAVYYCAAYDSSRYALYWGQGTQVTVSS

SEQ ID NO: 40398 - protein, 118 aa, Artificial Sequence
  Chemically Synthesized
QVQLQESGGGLVQAGGSLRLSCAASGTIFAWVPMGWYRQAPGKERELVASINQNYADSVKGRFTISRDNAKNTVYLQMNSLKPEDTAVYYCAVDYTADDGPPTYFTYWGQGTQVTVSS

SEQ ID NO: 40399 - protein, 118 aa, Artificial Sequence
  Chemically Synthesized
QVQLQESGGGLVQAGGSLRLSCAASGTIFINLDMGWYRQAPGKERELVAGIAVGATTNYADSVKGRFTISRDNAKNTVYLQMNSLKPEDTAVYYCAAPWRLYNPHSYWGQGTQVTVSS

SEQ ID NO: 40400 - protein, 110 aa, Artificial Sequence
  Chemically Synthesized
QVQLQESGGGLVQAGGSLRLSCAASGNISPSDDMGWYRQAPGKERELVAAIDDGGNTNYADSVKGRFTISRDNAKNTVYLQMNSLKPEDTAVYYCAVIYWGQGTQVTVSS

SEQ ID NO: 40401 - protein, 118 aa, Artificial Sequence
  Chemically Synthesized
QVQLQESGGGLVQAGGSLRLSCAASGTIFRSTDMGWYRQAPGKERELVATIGRGTNTNYADSVKGRFTISRDNAKNTVYLQMNSLKPEDTAVYYCAAYYYDFDTLDYWGQGTQVTVSS

SEQ ID NO: 40402 - protein, 124 aa, Artificial Sequence
  Chemically Synthesized
QVQLQESGGGLVQAGGSLRLSCAASGTIFGVGDMGWYRQAPGKERELVAGIANGGITNYADSVKGRFTISRDNAKNTVYLQMNSLKPEDTAVYYCAVNNPQDRVVPYPVTYYYWGQGTQVTVSS

SEQ ID NO: 40403 - protein, 122 aa, Artificial Sequence
  Chemically Synthesized
QVQLQESGGGLVQAGGSLRLSCAASGTIFARFTMGWYRQAPGKERELVATIGVGGNTYYADSVKGRFTISRDNAKNTVYLQMNSLKPEDTAVYYCAVYEDYYDKYGSDFGYWGQGTQVTVSS

SEQ ID NO: 40404 - protein, 125 aa, Artificial Sequence
  Chemically Synthesized
QVQLQESGGGLVQAGGSLRLSCAASGYIFWTYGMGWYRQAPGKEREFVAAISGGNTYYADSVKGRFTISRDNAKNTVYLQMNSLKPEDTAVYYCAVRNTYRYPIYPRAYGGFWYWGQGTQVTVSS

SEQ ID NO: 40405 - protein, 118 aa, Artificial Sequence
  Chemically Synthesized
QVQLQESGGGLVQAGGSLRLSCAASGYIFDDGDMGWYRQAPGKEREFVATINRGTTTNYADSVKGRFTISRDNAKNTVYLQMNSLKPEDTAVYYCAVYTPFITSYWYWGQGTQVTVSS

SEQ ID NO: 40406 - protein, 121 aa, Artificial Sequence
  Chemically Synthesized
QVQLQESGGGLVQAGGSLRLSCAASGYISPATWMGWYRQAPGKEREFVAAIDSGSSTNYADSVKGRFTISRDNAKNTVYLQMNSLKPEDTAVYYCAAYYGTVHEQGFHGYWGQGTQVTVSS

SEQ ID NO: 40407 - protein, 118 aa, Artificial Sequence
  Chemically Synthesized
QVQLQESGGGLVQAGGSLRLSCAASGSISSGYWMGWYRQAPGKEREFVAAIAYGGSTYYADSVKGRFTISRDNAKNTVYLQMNSLKPEDTAVYYCAVGLQREPYHTYWGQGTQVTVSS

SEQ ID NO: 40408 - protein, 118 aa, Artificial Sequence
  Chemically Synthesized
QVQLQESGGGLVQAGGSLRLSCAASGNISLIGDMGWYRQAPGKERELVAGITKGANTNYADSVKGRFTISRDNAKNTVYLQMNSLKPEDTAVYYCAVTRLPVWTLKYWGQGTQVTVSS

SEQ ID NO: 40409 - protein, 122 aa, Artificial Sequence
  Chemically Synthesized
QVQLQESGGGLVQAGGSLRLSCAASGNISQWQYMGWYRQAPGKERELVAGIAPGGTTNYADSVKGRFTISRDNAKNTVYLQMNSLKPEDTAVYYCAADYGVGPQSAVTHSYWGQGTQVTVSS

SEQ ID NO: 40410 - protein, 122 aa, Artificial Sequence
  Chemically Synthesized
QVQLQESGGGLVQAGGSLRLSCAASGYISHSGRMGWYRQAPGKEREFVATIAYGTTTNYADSVKGRFTISRDNAKNTVYLQMNSLKPEDTAVYYCAAVRRPRYTGTWRYYYWGQGTQVTVSS

SEQ ID NO: 40411 - protein, 118 aa, Artificial Sequence
  Chemically Synthesized
QVQLQESGGGLVQAGGSLRLSCAASGTISDDSLMGWYRQAPGKEREFVAGINTGTNTYYADSVKGRFTISRDNAKNTVYLQMNSLKPEDTAVYYCAATSYHAGRLPYWGQGTQVTVSS

SEQ ID NO: 40412 - protein, 118 aa, Artificial Sequence
  Chemically Synthesized
QVQLQESGGGLVQAGGSLRLSCAASGSIFEGYYMGWYRQAPGKERELVAAIGNGGNTYYADSVKGRFTISRDNAKNTVYLQMNSLKPEDTAVYYCAVPRDSPTDHSYWGQGTQVTVSS

SEQ ID NO: 40413 - protein, 117 aa, Artificial Sequence
  Chemically Synthesized
QVQLQESGGGLVQAGGSLRLSCAASGTIFRDWHMGWYRQAPGKERELVATIARGGITNYADSVKGRFTISRDNAKNTVYLQMNSLKPEDTAVYYCAVFVDDDISMYWGQGTQVTVSS

SEQ ID NO: 40414 - protein, 117 aa, Artificial Sequence
  Chemically Synthesized
QVQLQESGGGLVQAGGSLRLSCAASGTIFWYYDMGWYRQAPGKERELLPVLITVLLPYADSVKGRFTISRDNAKNTVYLQMNSLKPEDTAVYYCAVRYRKRISYDYWGQGTQVTVSS

SEQ ID NO: 40415 - protein, 118 aa, Artificial Sequence
  Chemically Synthesized
QVQLQESGGGLVQAGGSLRLSCAASGNISYTQRMGWYRQAPGKEREFVATITDGSSTYYADSVKGRFTISRDNAKNTVYLQMNSLKPEDTAVYYCAVKRRYYTRLTYWGQGTQVTVSS

SEQ ID NO: 40416 - protein, 117 aa, Artificial Sequence
  Chemically Synthesized
QVQLQESGGGLVQAGGSLRLSCAASGSIFYQGEMGWYRQAPGKERELVATIGEGASTYYADSVKGRFTISRDNAKNTVYLQMNSLKPEDTAVYYCAVDAYSTLNMYWGQGTQVTVSS

SEQ ID NO: 40417 - protein, 126 aa, Artificial Sequence
  Chemically Synthesized
QVQLQESGGGLVQAGGSLRLSCAASGSISPSYDMGWYRQAPGKEREFVATIDRGTTTYYADSVKGRFTISRDNAKNTVYLQMNSLKPEDTAVYYCAVDDYGDSGTRNYGIYPYDYWGQGTQVTVSS

SEQ ID NO: 40418 - protein, 117 aa, Artificial Sequence
  Chemically Synthesized
QVQLQESGGGLVQAGGSLRLSCAASGYIFRPSMGWYRQAPGKERELVAAIANGTSTNYADSVKGRFTISRDNAKNTVYLQMNSLKPEDTAVYYCAAGLDQNADLNYWGQGTQVTVSS

SEQ ID NO: 40419 - protein, 118 aa, Artificial Sequence
  Chemically Synthesized
QVQLQESGGGLVQAGGSLRLSCAASGSISLVVSMGWYRQAPGKERELVAAIGSGANTYYADSVKGRFTISRDNAKNTVYLQMNSLKPEDTAVYYCAAQDAYRGQLYYWGQGTQVTVSS

SEQ ID NO: 40420 - protein, 116 aa, Artificial Sequence
  Chemically Synthesized
QVQLQESGGGLVQAGGSLRLSCAASGSISRNTEMGWYRQAPGKERELVAAITYGGTTNYADSVKGRFTISRDNAKNTVYLQMNSLKPEDTAVYYCAATSVRVLGYWGQGTQVTVSS

SEQ ID NO: 40421 - protein, 118 aa, Artificial Sequence
  Chemically Synthesized
QVQLQESGGGLVQAGGSLRLSCAASGSISPGYSMGWYRQAPGKEREFVAAINHGTSTYYADSVKGRFTISRDNAKNTVYLQMNSLKPEDTAVYYCAVRYWYPDRYYYWGQGTQVTVSS

SEQ ID NO: 40422 - protein, 118 aa, Artificial Sequence
  Chemically Synthesized
QVQLQESGGGLVQAGGSLRLSCAASGSISLAYIMGWYRQAPGKERELVATIARGTTTYYADSVKGRFTISRDNAKNTVYLQMNSLKPEDTAVYYCAAHAARYYIHDYWGQGTQVTVSS

SEQ ID NO: 40423 - protein, 111 aa, Artificial Sequence
  Chemically Synthesized
QVQLQESGGGLVQAGGSLRLSCAASGYISLSSAMGWYRQAPGKERELVAYLYADSVKGRFTISRDNAKNTVYLQMNSLKPEDTAVYYCAVDGGYSRYYDYWGQGTQVTVSS

SEQ ID NO: 40424 - protein, 121 aa, Artificial Sequence
  Chemically Synthesized
QVQLQESGGGLVQAGGSLRLSCAASGNISDSGMGWYRQAPGKERELVASIAQGSSTYYADSVKGRFTISRDNAKNTVYLQMNSLKPEDTAVYYCAARITLVYFDLGEFAYWGQGTQVTVSS

SEQ ID NO: 40425 - protein, 118 aa, Artificial Sequence
  Chemically Synthesized
QVQLQESGGGLVQAGGSLRLSCAASGNISHQSAMGWYRQAPGKERELVAAINLGANTNYADSVKGRFTISRDNAKNTVYLQMNSLKPEDTAVYYCAVYPYLYYPHIYWGQGTQVTVSS

SEQ ID NO: 40426 - protein, 118 aa, Artificial Sequence
  Chemically Synthesized
QVQLQESGGGLVQAGGSLRLSCAASGTISLGYGMGWYRQAPGKEREFVAGIDLGTNTYYADSVKGRFTISRDNAKNTVYLQMNSLKPEDTAVYYCAVEYPWYPYHSYWGQGTQVTVSS

SEQ ID NO: 40427 - protein, 122 aa, Artificial Sequence
  Chemically Synthesized
QVQLQESGGGLVQAGGSLRLSCAASGYIFDSLGMGWYRQAPGKEREFVAAIGSGATTYYADSVKGRFTISRDNAKNTVYLQMNSLKPEDTAVYYCAVQRYVGVSSGYYFKYWGQGTQVTVSS

SEQ ID NO: 40428 - protein, 117 aa, Artificial Sequence
  Chemically Synthesized
QVQLQESGGGLVQAGGSLRLSCAASGTISGYDYMGWYRQAPGKERELVASIDYGSITNYADSVKGRFTISRDNAKNTVYLQMNSLKPEDTAVYYCAAAGNQGDHSYWGQGTQVTVSS

SEQ ID NO: 40429 - protein, 126 aa, Artificial Sequence
  Chemically Synthesized
QVQLQESGGGLVQAGGSLRLSCAASGSISDYVIMGWYRQAPGKERELVAAIDIGAITYYADSVKGRFTISRDNAKNTVYLQMNSLKPEDTAVYYCAAAGSAYYRWPPTYQYLHAYWGQGTQVTVSS

SEQ ID NO: 40430 - protein, 122 aa, Artificial Sequence
  Chemically Synthesized
QVQLQESGGGLVQAGGSLRLSCAASGYIFDTRTMGWYRQAPGKERELVATIASGGTTYYADSVKGRFTISRDNAKNTVYLQMNSLKPEDTAVYYCAADTLSNRGDSNRLVYWGQGTQVTVSS

SEQ ID NO: 40431 - protein, 118 aa, Artificial Sequence
  Chemically Synthesized
QVQLQESGGGLVQAGGSLRLSCAASGNISVRRLMGWYRQAPGKERELVAAITYGGTTYYADSVKGRFTISRDNAKNTVYLQMNSLKPEDTAVYYCAVTTRWWSNHGYWGQGTQVTVSS

SEQ ID NO: 40432 - protein, 118 aa, Artificial Sequence
  Chemically Synthesized
QVQLQESGGGLVQAGGSLRLSCAASGSIFPFPWMGWYRQAPGKEREFVAGITYGAITNYADSVKGRFTISRDNAKNTVYLQMNSLKPEDTAVYYCAVWYFGGGYYYYWGQGTQVTVSS

SEQ ID NO: 40433 - protein, 118 aa, Artificial Sequence
  Chemically Synthesized
QVQLQESGGGLVQAGGSLRLSCAASGSISRQTTMGWYRQAPGKEREFVATISYGSTTYYADSVKGRFTISRDNAKNTVYLQMNSLKPEDTAVYYCAVYYYVDSELGYWGQGTQVTVSS

SEQ ID NO: 40434 - protein, 126 aa, Artificial Sequence
  Chemically Synthesized
QVQLQESGGGLVQAGGSLRLSCAASGSISLDGYMGWYRQAPGKEREFVAAIDGGTSTNYADSVKGRFTISRDNAKNTVYLQMNSLKPEDTAVYYCAAVDYVYSSESVDHFYYLVYWGQGTQVTVSS

SEQ ID NO: 40435 - protein, 117 aa, Artificial Sequence
  Chemically Synthesized
QVQLQESGGGLVQAGGSLRLSCAASGTIFSDDEMGWYRQAPGKEREFVASIDSVLLPYADSVKGRFTISRDNAKNTVYLQMNSLKPEDTAVYYCAAEYTSDWTYVYWGQGTQVTVSS

SEQ ID NO: 40436 - protein, 121 aa, Artificial Sequence
  Chemically Synthesized
QVQLQESGGGLVQAGGSLRLSCAASGSISYWFMGWYRQAPGKERELVAGIDLGTITYYADSVKGRFTISRDNAKNTVYLQMNSLKPEDTAVYYCAAYVAYDPHETYGHHYWGQGTQVTVSS

SEQ ID NO: 40437 - protein, 125 aa, Artificial Sequence
  Chemically Synthesized
QVQLQESGGGLVQAGGSLRLSCAASGTIFAGAVMGWYRQAPGKEREFVAAIAVGGNTNYADSVKGRFTISRDNAKNTVYLQMNSLKPEDTAVYYCAVITNVVTDHSYSVSGLPYWGQGTQVTVSS

SEQ ID NO: 40438 - protein, 122 aa, Artificial Sequence
  Chemically Synthesized
QVQLQESGGGLVQAGGSLRLSCAASGSISARDLMGWYRQAPGKEREFVAGIDPGGNTNYADSVKGRFTISRDNAKNTVYLQMNSLKPEDTAVYYCAVRGWYYFRYYRDHGYWGQGTQVTVSS

SEQ ID NO: 40439 - protein, 109 aa, Artificial Sequence
  Chemically Synthesized
QVQLQESGGGLVQAGGSLRLSCAASGYISQPWFMGWYRQAPGKERELVATIGYGATTYYADSVKGRFTISRDNAKNTVYLQMNSLKPEDTAVYYCASYWGQGTQVTVSS

SEQ ID NO: 40440 - protein, 126 aa, Artificial Sequence
  Chemically Synthesized
QVQLQESGGGLVQAGGSLRLSCAASGNIFDYTNMGWYRQAPGKERELVAAITAGTTTYYADSVKGRFTISRDNAKNTVYLQMNSLKPEDTAVYYCAAINELPTYPDHLDYTSYRYWGQGTQVTVSS

SEQ ID NO: 40441 - protein, 122 aa, Artificial Sequence
  Chemically Synthesized
QVQLQESGGGLVQAGGSLRLSCAASGTIFVDYYMGWYRQAPGKERELVATINWGGITNYADSVKGRFTISRDNAKNTVYLQMNSLKPEDTAVYYCAVDQVLYGGSDTDYDYWGQGTQVTVSS

SEQ ID NO: 40442 - protein, 117 aa, Artificial Sequence
  Chemically Synthesized
QVQLQESGGGLVQAGGSLRLSCAASGYISQGDFMGWYRQAPGKERELVAGMVTVLIPYADSVKGRFTISRDNAKNTVYLQMNSLKPEDTAVYYCAASDDLYLFYYYWGQGTQVTVSS

SEQ ID NO: 40443 - protein, 122 aa, Artificial Sequence
  Chemically Synthesized
QVQLQESGGGLVQAGGSLRLSCAASGNIFGSDYMGWYRQAPGKERELVATISEGSSTYYADSVKGRFTISRDNAKNTVYLQMNSLKPEDTAVYYCAVAQRWHPPRYNVHYYWGQGTQVTVSS

SEQ ID NO: 40444 - protein, 122 aa, Artificial Sequence
  Chemically Synthesized
QVQLQESGGGLVQAGGSLRLSCAASGSIFRVSFMGWYRQAPGKERELVAGIGYGTSTYYADSVKGRFTISRDNAKNTVYLQMNSLKPEDTAVYYCAVLQDYIGRRRTDHDYWGQGTQVTVSS

SEQ ID NO: 40445 - protein, 118 aa, Artificial Sequence
  Chemically Synthesized
QVQLQESGGGLVQAGGSLRLSCAASGSISRSIDMGWYRQAPGKEREFVATISYGTSTNYADSVKGRFTISRDNAKNTVYLQMNSLKPEDTAVYYCAVTGGIVDDHSYWGQGTQVTVSS

SEQ ID NO: 40446 - protein, 122 aa, Artificial Sequence
  Chemically Synthesized
QVQLQESGGGLVQAGGSLRLSCAASGTIFGIYYMGWYRQAPGKERELVAAINYGSITYYADSVKGRFTISRDNAKNTVYLQMNSLKPEDTAVYYCAVRLSRYSSGYKTHVYWGQGTQVTVSS

SEQ ID NO: 40447 - protein, 126 aa, Artificial Sequence
  Chemically Synthesized
QVQLQESGGGLVQAGGSLRLSCAASGNISRSYWMGWYRQAPGKERELVAGITEGTNTYYADSVKGRFTISRDNAKNTVYLQMNSLKPEDTAVYYCAAAPDGWDYTAPDAGVGHWYWGQGTQVTVSS

SEQ ID NO: 40448 - protein, 122 aa, Artificial Sequence
  Chemically Synthesized
QVQLQESGGGLVQAGGSLRLSCAASGSISRLDTMGWYRQAPGKERELVAAINGGGITNYADSVKGRFTISRDNAKNTVYLQMNSLKPEDTAVYYCAASDGGYSAWYDGHEYWGQGTQVTVSS

SEQ ID NO: 40449 - protein, 122 aa, Artificial Sequence
  Chemically Synthesized
QVQLQESGGGLVQAGGSLRLSCAASGSISTGKGMGWYRQAPGKERELVAAIAYGGITYYADSVKGRFTISRDNAKNTVYLQMNSLKPEDTAVYYCAVIPRDTNDFPWSHTYWGQGTQVTVSS

SEQ ID NO: 40450 - protein, 126 aa, Artificial Sequence
  Chemically Synthesized
QVQLQESGGGLVQAGGSLRLSCAASGTISAQGHMGWYRQAPGKERELVAGIADGSITYYADSVKGRFTISRDNAKNTVYLQMNSLKPEDTAVYYCAVFYPGRYLDTDTYQESHLYWGQGTQVTVSS

SEQ ID NO: 40451 - protein, 121 aa, Artificial Sequence
  Chemically Synthesized
QVQLQESGGGLVQAGGSLRLSCAASGYISDETPMGWYRQAPGKERELVAAIAAGGTTNYADSVKGRFTISRDNAKNTVYLQMNSLKPEDTAVYYCAVYATSYHDDGSVLYWGQGTQVTVSS

SEQ ID NO: 40452 - protein, 123 aa, Artificial Sequence
  Chemically Synthesized
QVQLQESGGGLVQAGGSLRLSCAASGSISEHQVMGWYRQAPGKERELVAGITQGSTTYYADSVKGRFTISRDNAKNTVYLQMNSLKPEDTAVYYCAVYGDNSYQYAFDVFDYWGQGTQVTVSS

SEQ ID NO: 40453 - protein, 121 aa, Artificial Sequence
  Chemically Synthesized
QVQLQESGGGLVQAGGSLRLSCAASGNISTGDWMGWYRQAPGKERELVAGIGSGATTYYADSVKGRFTISRDNAKNTVYLQMNSLKPEDTAVYYCAVYYDKLATIYYLVYWGQGTQVTVSS

SEQ ID NO: 40454 - protein, 126 aa, Artificial Sequence
  Chemically Synthesized
QVQLQESGGGLVQAGGSLRLSCAASGNISYVRSMGWYRQAPGKERELVASISDGASTYYADSVKGRFTISRDNAKNTVYLQMNSLKPEDTAVYYCAAKLRWRSYGPSVATGSHGYWGQGTQVTVSS

SEQ ID NO: 40455 - protein, 118 aa, Artificial Sequence
  Chemically Synthesized
QVQLQESGGGLVQAGGSLRLSCAASGSIFETFTMGWYRQAPGKEREFVATIAFRWYYQYADSVKGRFTISRDNAKNTVYLQMNSLKPEDTAVYYCAVVLRYSQLYVYWGQGTQVTVSS

SEQ ID NO: 40456 - protein, 122 aa, Artificial Sequence
  Chemically Synthesized
QVQLQESGGGLVQAGGSLRLSCAASGTISFYDYMGWYRQAPGKEREFVAAINAGGNTYYADSVKGRFTISRDNAKNTVYLQMNSLKPEDTAVYYCAVESGDSWDYLWDHGYWGQGTQVTVSS

SEQ ID NO: 40457 - protein, 121 aa, Artificial Sequence
  Chemically Synthesized
QVQLQESGGGLVQAGGSLRLSCAASGTIFLVLMGWYRQAPGKEREFVASIATGTITYYADSVKGRFTISRDNAKNTVYLQMNSLKPEDTAVYYCAADGGASRGLYGHYTYWGQGTQVTVSS

SEQ ID NO: 40458 - protein, 119 aa, Artificial Sequence
  Chemically Synthesized
QVQLQESGGGLVQAGGSLRLSCAASGTISYVIGDMGWYRQAPGKERELVAGITAGGSTNYADSVKGRFTISRDNAKNTVYLQMNSLKPEDTAVYYCAVGYDWRQTHVYWGQGTQVTVSS

SEQ ID NO: 40459 - protein, 118 aa, Artificial Sequence
  Chemically Synthesized
QVQLQESGGGLVQAGGSLRLSCAASGTIFVPYYMGWYRQAPGKERELVASINWGTSTNYADSVKGRFTISRDNAKNTVYLQMNSLKPEDTAVYYCAAYRYYSRSYVYWGQGTQVTVSS

SEQ ID NO: 40460 - protein, 118 aa, Artificial Sequence
  Chemically Synthesized
QVQLQESGGGLVQAGGSLRLSCAASGNIFRRVYMGWYRQAPGKEREFVAAITRGSTTYYADSVKGRFTISRDNAKNTVYLQMNSLKPEDTAVYYCAVWRGYATSLSYWGQGTQVTVSS

SEQ ID NO: 40461 - protein, 122 aa, Artificial Sequence
  Chemically Synthesized
QVQLQESGGGLVQAGGSLRLSCAASGSIFRPYAMGWYRQAPGKERELVAAISTGGITNYADSVKGRFTISRDNAKNTVYLQMNSLKPEDTAVYYCAVYSRYGPVTRSRHYYWGQGTQVTVSS

SEQ ID NO: 40462 - protein, 122 aa, Artificial Sequence
  Chemically Synthesized
QVQLQESGGGLVQAGGSLRLSCAASGSIFRYAYMGWYRQAPGKEREFVASITAGATTNYADSVKGRFTISRDNAKNTVYLQMNSLKPEDTAVYYCAVHRARYRGYYYYYGYWGQGTQVTVSS

SEQ ID NO: 40463 - protein, 118 aa, Artificial Sequence
  Chemically Synthesized
QVQLQESGGGLVQAGGSLRLSCAASGTIFIYYYMGWYRQAPGKEREFVAAIGAGSTTYYADSVKGRFTISRDNAKNTVYLQMNSLKPEDTAVYYCAVSITGDEYHRYWGQGTQVTVSS

SEQ ID NO: 40464 - protein, 126 aa, Artificial Sequence
  Chemically Synthesized
QVQLQESGGGLVQAGGSLRLSCAASGTISSRVLMGWYRQAPGKERELVAAISGGANTNYADSVKGRFTISRDNAKNTVYLQMNSLKPEDTAVYYCAVWAHYEHTISHYYFRPHPYWGQGTQVTVSS

SEQ ID NO: 40465 - protein, 118 aa, Artificial Sequence
  Chemically Synthesized
QVQLQESGGGLVQAGGSLRLSCAASGSISDIRYMGWYRQAPGKERELVAGISAGGTTYYADSVKGRFTISRDNAKNTVYLQMNSLKPEDTAVYYCAAPSTKWDRLVYWGQGTQVTVSS

SEQ ID NO: 40466 - protein, 126 aa, Artificial Sequence
  Chemically Synthesized
QVQLQESGGGLVQAGGSLRLSCAASGYISDSPGMGWYRQAPGKERELVAGITTGSNTYYADSVKGRFTISRDNAKNTVYLQMNSLKPEDTAVYYCAAIQYTYNWRHWVGRDPHSYWGQGTQVTVSS

SEQ ID NO: 40467 - protein, 126 aa, Artificial Sequence
  Chemically Synthesized
QVQLQESGGGLVQAGGSLRLSCAASGTIFPDAYMGWYRQAPGKEREFVAAIDYGATTYYADSVKGRFTISRDNAKNTVYLQMNSLKPEDTAVYYCAVDGNRRNGEWVDYVRILSYWGQGTQVTVSS

SEQ ID NO: 40468 - protein, 118 aa, Artificial Sequence
  Chemically Synthesized
QVQLQESGGGLVQAGGSLRLSCAASGSISTSAVMGWYRQAPGKERELVAGIDGGGNTYYADSVKGRFTISRDNAKNTVYLQMNSLKPEDTAVYYCAAGYGFGTVYVYWGQGTQVTVSS

SEQ ID NO: 40469 - protein, 122 aa, Artificial Sequence
  Chemically Synthesized
QVQLQESGGGLVQAGGSLRLSCAASGNIFRYDYMGWYRQAPGKERELVAGIDSGTNTNYADSVKGRFTISRDNAKNTVYLQMNSLKPEDTAVYYCAAYIGDFPRRVRQLTYWGQGTQVTVSS

SEQ ID NO: 40470 - protein, 118 aa, Artificial Sequence
  Chemically Synthesized
QVQLQESGGGLVQAGGSLRLSCAASGNIFGSYEMGWYRQAPGKEREFVAGIAFGSITYYADSVKGRFTISRDNAKNTVYLQMNSLKPEDTAVYYCAAYGYSAYDFRYWGQGTQVTVSS

SEQ ID NO: 40471 - protein, 122 aa, Artificial Sequence
  Chemically Synthesized
QVQLQESGGGLVQAGGSLRLSCAASGNIFRTWFMGWYRQAPGKEREFVAAITYGGTTNYADSVKGRFTISRDNAKNTVYLQMNSLKPEDTAVYYCAVGHDTLVPDDVDLHYWGQGTQVTVSS

SEQ ID NO: 40472 - protein, 111 aa, Artificial Sequence
  Chemically Synthesized
QVQLQESGGGLVQAGGSLRLSCAASGNIFYSYEMGWYRQAPGKERELVAGISRGANTNYADSVKGRFTISRDNAKNTVYLQMNSLKPEDTAVYYCAFLYYWGQGTQVTVSS

SEQ ID NO: 40473 - protein, 118 aa, Artificial Sequence
  Chemically Synthesized
QVQLQESGGGLVQAGGSLRLSCAASGSIFPPAVMGWYRQAPGKERELVASISEGGSTYYADSVKGRFTISRDNAKNTVYLQMNSLKPEDTAVYYCAASRPTESHHRYWGQGTQVTVSS

SEQ ID NO: 40474 - protein, 122 aa, Artificial Sequence
  Chemically Synthesized
QVQLQESGGGLVQAGGSLRLSCAASGTISDLPAMGWYRQAPGKEREFVATIDDGGNTYYADSVKGRFTISRDNAKNTVYLQMNSLKPEDTAVYYCAVYAPLYNYDVGGHSYWGQGTQVTVSS

SEQ ID NO: 40475 - protein, 118 aa, Artificial Sequence
  Chemically Synthesized
QVQLQESGGGLVQAGGSLRLSCAASGNISGTIFMGWYRQAPGKERELVASIAPGGTTYYADSVKGRFTISRDNAKNTVYLQMNSLKPEDTAVYYCAVQYLAYNLFQYWGQGTQVTVSS

SEQ ID NO: 40476 - protein, 118 aa, Artificial Sequence
  Chemically Synthesized
QVQLQESGGGLVQAGGSLRLSCAASGSIFRDYAMGWYRQAPGKEREFVAAITVGAITNYADSVKGRFTISRDNAKNTVYLQMNSLKPEDTAVYYCAVHDYDSYALVYWGQGTQVTVSS

SEQ ID NO: 40477 - protein, 118 aa, Artificial Sequence
  Chemically Synthesized
QVQLQESGGGLVQAGGSLRLSCAASGSIFKRRSMGWYRQAPGKEREFVASITRGTTTYYADSVKGRFTISRDNAKNTVYLQMNSLKPEDTAVYYCAANYLSYAYFYYWGQGTQVTVSS

SEQ ID NO: 40478 - protein, 118 aa, Artificial Sequence
  Chemically Synthesized
QVQLQESGGGLVQAGGSLRLSCAASGNISEREGMGWYRQAPGKERELVASINVGTITNYADSVKGRFTISRDNAKNTVYLQMNSLKPEDTAVYYCAVTDGVGYGHRYWGQGTQVTVSS

SEQ ID NO: 40479 - protein, 126 aa, Artificial Sequence
  Chemically Synthesized
QVQLQESGGGLVQAGGSLRLSCAASGSIFDWYYMGWYRQAPGKEREFVAAISRGGSTYYADSVKGRFTISRDNAKNTVYLQMNSLKPEDTAVYYCAVKSLYSTLDEYYTANDFAYWGQGTQVTVSS

SEQ ID NO: 40480 - protein, 122 aa, Artificial Sequence
  Chemically Synthesized
QVQLQESGGGLVQAGGSLRLSCAASGSISDTYIMGWYRQAPGKEREFVAGISTGTTTYYADSVKGRFTISRDNAKNTVYLQMNSLKPEDTAVYYCAASDYVIGGGDSTYEYWGQGTQVTVSS

SEQ ID NO: 40481 - protein, 126 aa, Artificial Sequence
  Chemically Synthesized
QVQLQESGGGLVQAGGSLRLSCAASGYIFLASIMGWYRQAPGKEREFVASISFGANTNYADSVKGRFTISRDNAKNTVYLQMNSLKPEDTAVYYCAAVPSWRDWYNKQRIKYFGYWGQGTQVTVSS

SEQ ID NO: 40482 - protein, 118 aa, Artificial Sequence
  Chemically Synthesized
QVQLQESGGGLVQAGGSLRLSCAASGSIFPPDAMGWYRQAPGKERELVASIDYGTSTYYADSVKGRFTISRDNAKNTVYLQMNSLKPEDTAVYYCAVDRYNPWTYEYWGQGTQVTVSS

SEQ ID NO: 40483 - protein, 117 aa, Artificial Sequence
  Chemically Synthesized
QVQLQESGGGLVQAGGSLRLSCAASGSIFWRVYMGWYRQAPGKEREFVASITGGSITYYADSVKGRFTISRDNAKNTVYLQMNSLKPEDTAVYYCAAQVGDTGLYYWGQGTQVTVSS

SEQ ID NO: 40484 - protein, 118 aa, Artificial Sequence
  Chemically Synthesized
QVQLQESGGGLVQAGGSLRLSCAASGYIFTIPYMGWYRQAPGKEREFVAGINTGASTYYADSVKGRFTISRDNAKNTVYLQMNSLKPEDTAVYYCAVSGRRGYWYYYWGQGTQVTVSS

SEQ ID NO: 40485 - protein, 118 aa, Artificial Sequence
  Chemically Synthesized
QVQLQESGGGLVQAGGSLRLSCAASGNIFNGVDMGWYRQAPGKERELVATITRGTNTYYADSVKGRFTISRDNAKNTVYLQMNSLKPEDTAVYYCAADNNYSSGHTYWGQGTQVTVSS

SEQ ID NO: 40486 - protein, 127 aa, Artificial Sequence
  Chemically Synthesized
QVQLQESGGGLVQAGGSLRLSCAASGYIFRDAIMGWYRQAPGKERELVAAIDIGSITNYADSVKGRFTISRDNAKNTVYLQMNSLKPEDTAVYYCAADRSWPDGYRDQTYAYDYDYWGQGTQVTVSS

SEQ ID NO: 40487 - protein, 117 aa, Artificial Sequence
  Chemically Synthesized
QVQLQESGGGLVQAGGSLRLSCAASGYISRYSYMGWYRQAPGKEREFVAAIAGASTNYADSVKGRFTISRDNAKNTVYLQMNSLKPEDTAVYYCAAYFIYPYWFRYWGQGTQVTVSS

SEQ ID NO: 40488 - protein, 122 aa, Artificial Sequence
  Chemically Synthesized
QVQLQESGGGLVQAGGSLRLSCAASGSISDSKSMGWYRQAPGKERELVATIAYGASTYYADSVKGRFTISRDNAKNTVYLQMNSLKPEDTAVYYCAVFLPYYYKFGLYLYYWGQGTQVTVSS

SEQ ID NO: 40489 - protein, 118 aa, Artificial Sequence
  Chemically Synthesized
QVQLQESGGGLVQAGGSLRLSCAASGTIFDGSGMGWYRQAPGKERELVATITTGTSTYYADSVKGRFTISRDNAKNTVYLQMNSLKPEDTAVYYCAARLYRYYRYPYWGQGTQVTVSS

SEQ ID NO: 40490 - protein, 122 aa, Artificial Sequence
  Chemically Synthesized
QVQLQESGGGLVQAGGSLRLSCAASGTIFDYYGMGWYRQAPGKEREFVASIGYGTSTNYADSVKGRFTISRDNAKNTVYLQMNSLKPEDTAVYYCAAWVVDVDEDPYRLQYWGQGTQVTVSS

SEQ ID NO: 40491 - protein, 118 aa, Artificial Sequence
  Chemically Synthesized
QVQLQESGGGLVQAGGSLRLSCAASGNIFPESNMGWYRQAPGKERELVAAIDAGGTTNYADSVKGRFTISRDNAKNTVYLQMNSLKPEDTAVYYCAANDRYGYYYRYWGQGTQVTVSS

SEQ ID NO: 40492 - protein, 126 aa, Artificial Sequence
  Chemically Synthesized
QVQLQESGGGLVQAGGSLRLSCAASGYISRRDYMGWYRQAPGKEREFVAGIAYGSTTYYADSVKGRFTISRDNAKNTVYLQMNSLKPEDTAVYYCAVVYYRYYGVNRWFRHDHTYWGQGTQVTVSS

SEQ ID NO: 40493 - protein, 122 aa, Artificial Sequence
  Chemically Synthesized
QVQLQESGGGLVQAGGSLRLSCAASGSIFGQIHMGWYRQAPGKERELVASITYGATTYYADSVKGRFTISRDNAKNTVYLQMNSLKPEDTAVYYCAVAADGRVSRYKRHYYWGQGTQVTVSS

SEQ ID NO: 40494 - protein, 117 aa, Artificial Sequence
  Chemically Synthesized
QVQLQESGGGLVQAGGSLRLSCAASGNIFYYINMGWYRQAPGKERELVATITRGARPYADSVKGRFTISRDNAKNTVYLQMNSLKPEDTAVYYCAAHSPLWIVHDYWGQGTQVTVSS

SEQ ID NO: 40495 - protein, 112 aa, Artificial Sequence
  Chemically Synthesized
QVQLQESGGGLVQAGGSLRLSCAASGYIFDDYVMGWYRQAPGKEREFVAAITRGGTTYYADSVKGRFTISRDNAKNTVYLQMNSLKPEDTAVYYCAACTMYWGQGTQVTVSS

SEQ ID NO: 40496 - protein, 122 aa, Artificial Sequence
  Chemically Synthesized
QVQLQESGGGLVQAGGSLRLSCAASGYISAIPVMGWYRQAPGKERELVAAIDYGGITYYADSVKGRFTISRDNAKNTVYLQMNSLKPEDTAVYYCAVYYTAYQVADLLYGYWGQGTQVTVSS

SEQ ID NO: 40497 - protein, 118 aa, Artificial Sequence
  Chemically Synthesized
QVQLQESGGGLVQAGGSLRLSCAASGTISNSPDMGWYRQAPGKERELVASIGSGGTTYYADSVKGRFTISRDNAKNTVYLQMNSLKPEDTAVYYCAVFGRAPGPYDYWGQGTQVTVSS

SEQ ID NO: 40498 - protein, 126 aa, Artificial Sequence
  Chemically Synthesized
QVQLQESGGGLVQAGGSLRLSCAASGYISRRSVMGWYRQAPGKERELVAGIGGGTSTYYADSVKGRFTISRDNAKNTVYLQMNSLKPEDTAVYYCAADRTYVRFTTGQEYLYHDYWGQGTQVTVSS

SEQ ID NO: 40499 - protein, 126 aa, Artificial Sequence
  Chemically Synthesized
QVQLQESGGGLVQAGGSLRLSCAASGYISDSSYMGWYRQAPGKEREFVASINGGGTTYYADSVKGRFTISRDNAKNTVYLQMNSLKPEDTAVYYCAAPVAVGLYGTSADSTTHAYWGQGTQVTVSS

SEQ ID NO: 40500 - protein, 118 aa, Artificial Sequence
  Chemically Synthesized
QVQLQESGGGLVQAGGSLRLSCAASGNISSAYAMGWYRQAPGKEREFVATIGGGANTNYADSVKGRFTISRDNAKNTVYLQMNSLKPEDTAVYYCAVEGDVPDLHAYWGQGTQVTVSS

SEQ ID NO: 40501 - protein, 119 aa, Artificial Sequence
  Chemically Synthesized
QVQLQESGGGLVQAGGSLRLSCAASGNIFTDGYTMGWYRQAPGKERELVATISAGTITYYADSVKGRFTISRDNAKNTVYLQMNSLKPEDTAVYYCAVVVARAPEFSYWGQGTQVTVSS

SEQ ID NO: 40502 - protein, 118 aa, Artificial Sequence
  Chemically Synthesized
QVQLQESGGGLVQAGGSLRLSCAASGTISSTVEMGWYRQAPGKERELVAAINSGGTTNYADSVKGRFTISRDNAKNTVYLQMNSLKPEDTAVYYCAVGDYTRYPLYYWGQGTQVTVSS

SEQ ID NO: 40503 - protein, 118 aa, Artificial Sequence
  Chemically Synthesized
QVQLQESGGGLVQAGGSLRLSCAASGNISDVLYMGWYRQAPGKERELVAGIAIGTNTYYADSVKGRFTISRDNAKNTVYLQMNSLKPEDTAVYYCAVLYDGKDQLDYWGQGTQVTVSS

SEQ ID NO: 40504 - protein, 122 aa, Artificial Sequence
  Chemically Synthesized
QVQLQESGGGLVQAGGSLRLSCAASGTISRPARMGWYRQAPGKEREFVASIAHGGITYYADSVKGRFTISRDNAKNTVYLQMNSLKPEDTAVYYCAVSAPWYYSWVERHRYWGQGTQVTVSS

SEQ ID NO: 40505 - protein, 122 aa, Artificial Sequence
  Chemically Synthesized
QVQLQESGGGLVQAGGSLRLSCAASGTISSPYLMGWYRQAPGKEREFVASIGIGTSTNYADSVKGRFTISRDNAKNTVYLQMNSLKPEDTAVYYCAAYIVWRSWSYSGHLYWGQGTQVTVSS

SEQ ID NO: 40506 - protein, 118 aa, Artificial Sequence
  Chemically Synthesized
QVQLQESGGGLVQAGGSLRLSCAASGSIFQLRIMGWYRQAPGKEREFVAAITRGATTYYADSVKGRFTISRDNAKNTVYLQMNSLKPEDTAVYYCAVVQRRQYNYSYWGQGTQVTVSS

SEQ ID NO: 40507 - protein, 118 aa, Artificial Sequence
  Chemically Synthesized
QVQLQESGGGLVQAGGSLRLSCAASGTIFYYHYMGWYRQAPGKEREFVAAITRGGSTNYADSVKGRFTISRDNAKNTVYLQMNSLKPEDTAVYYCAVGYAVFWRYWYWGQGTQVTVSS

SEQ ID NO: 40508 - protein, 120 aa, Artificial Sequence
  Chemically Synthesized
QVQLQESGGGLVQAGGSLRLSCAASGTISPVPYMGWYRQAPGKEREFVAAIDQGSNTYYADSVKGRFTISRDNAKNTVYLQMNSLKPEDTAVYYCAVIRFYDQYDYYGYWGQGTQVTVSS

SEQ ID NO: 40509 - protein, 120 aa, Artificial Sequence
  Chemically Synthesized
QVQLQESGGGLVQAGGSLRLSCAASGTIFDLGIMGWYRQAPGKEREFVAAIDYGYQYADSVKGRFTISRDNAKNTVYLQMNSLKPEDTAVYYCAVTYPLGPTNLRPYRYWGQGTQVTVSS

SEQ ID NO: 40510 - protein, 121 aa, Artificial Sequence
  Chemically Synthesized
QVQLQESGGGLVQAGGSLRLSCAASGTIFFWYGMGWYRQAPGKEREFVASIGRGGTTYYADSVKGRFTISRDNAKNTVYLQMNSLKPEDTAVYYCAVSNYFDYWNTYLDYWGQGTQVTVSS

SEQ ID NO: 40511 - protein, 122 aa, Artificial Sequence
  Chemically Synthesized
QVQLQESGGGLVQAGGSLRLSCAASGNISDGGRMGWYRQAPGKEREFVATIAVGAITNYADSVKGRFTISRDNAKNTVYLQMNSLKPEDTAVYYCAARVSYNYSARDGHYYWGQGTQVTVSS

SEQ ID NO: 40512 - protein, 117 aa, Artificial Sequence
  Chemically Synthesized
QVQLQESGGGLVQAGGSLRLSCAASGYISYTYMGWYRQAPGKERELVATIAKGSNTNYADSVKGRFTISRDNAKNTVYLQMNSLKPEDTAVYYCAAYFSRLVRYRYWGQGTQVTVSS

SEQ ID NO: 40513 - protein, 125 aa, Artificial Sequence
  Chemically Synthesized
QVQLQESGGGLVQAGGSLRLSCAASGTISYATYMGWYRQAPGKERELVAGISFGGITNYADSVKGRFTISRDNAKNTVYLQMNSLKPEDTAVYYCAVQGLEGETTYVYRPFLYYWGQGTQVTVSS

SEQ ID NO: 40514 - protein, 118 aa, Artificial Sequence
  Chemically Synthesized
QVQLQESGGGLVQAGGSLRLSCAASGTIFIRRGMGWYRQAPGKEREFVATITKGTTTYYADSVKGRFTISRDNAKNTVYLQMNSLKPEDTAVYYCAVSTGYVYRHYYWGQGTQVTVSS

SEQ ID NO: 40515 - protein, 122 aa, Artificial Sequence
  Chemically Synthesized
QVQLQESGGGLVQAGGSLRLSCAASGSISDAHGMGWYRQAPGKERELVAGISWGAITNYADSVKGRFTISRDNAKNTVYLQMNSLKPEDTAVYYCAAWDYRQYGDPPIHPYWGQGTQVTVSS

SEQ ID NO: 40516 - protein, 118 aa, Artificial Sequence
  Chemically Synthesized
QVQLQESGGGLVQAGGSLRLSCAASGYIFSRPSMGWYRQAPGKEREFVATISGGASTNYADSVKGRFTISRDNAKNTVYLQMNSLKPEDTAVYYCAANGYWQSYFLYWGQGTQVTVSS

SEQ ID NO: 40517 - protein, 118 aa, Artificial Sequence
  Chemically Synthesized
QVQLQESGGGLVQAGGSLRLSCAASGTIFETSYMGWYRQAPGKEREFVAGIDQGGITNYADSVKGRFTISRDNAKNTVYLQMNSLKPEDTAVYYCAARVDPSADHVYWGQGTQVTVSS

SEQ ID NO: 40518 - protein, 118 aa, Artificial Sequence
  Chemically Synthesized
QVQLQESGGGLVQAGGSLRLSCAASGSIFRFDPMGWYRQAPGKERELVAGISYGSNTYYADSVKGRFTISRDNAKNTVYLQMNSLKPEDTAVYYCAVVDYGWVGFDYWGQGTQVTVSS

SEQ ID NO: 40519 - protein, 126 aa, Artificial Sequence
  Chemically Synthesized
QVQLQESGGGLVQAGGSLRLSCAASGYIFGGRIMGWYRQAPGKEREFVATITYGGNTNYADSVKGRFTISRDNAKNTVYLQMNSLKPEDTAVYYCAAIHHVRRDQGPYRDKQHRYWGQGTQVTVSS

SEQ ID NO: 40520 - protein, 126 aa, Artificial Sequence
  Chemically Synthesized
QVQLQESGGGLVQAGGSLRLSCAASGYISPPYYMGWYRQAPGKERELVAGITSGGTTNYADSVKGRFTISRDNAKNTVYLQMNSLKPEDTAVYYCAVYYWDDYDQPVTWGYAYPYWGQGTQVTVSS

SEQ ID NO: 40521 - protein, 122 aa, Artificial Sequence
  Chemically Synthesized
QVQLQESGGGLVQAGGSLRLSCAASGYIFYAYKMGWYRQAPGKEREFVAAITYGAITNYADSVKGRFTISRDNAKNTVYLQMNSLKPEDTAVYYCAVRYPYYTLLRYDLAYWGQGTQVTVSS

SEQ ID NO: 40522 - protein, 118 aa, Artificial Sequence
  Chemically Synthesized
QVQLQESGGGLVQAGGSLRLSCAASGNISPRYYMGWYRQAPGKEREFVATIDYGTNTYYADSVKGRFTISRDNAKNTVYLQMNSLKPEDTAVYYCAVIHITGDNYYYWGQGTQVTVSS

SEQ ID NO: 40523 - protein, 126 aa, Artificial Sequence
  Chemically Synthesized
QVQLQESGGGLVQAGGSLRLSCAASGTIFIDTVMGWYRQAPGKEREFVASISKGATTNYADSVKGRFTISRDNAKNTVYLQMNSLKPEDTAVYYCAVDDYTLVYGRTYRSIKHQYWGQGTQVTVSS

SEQ ID NO: 40524 - protein, 124 aa, Artificial Sequence
  Chemically Synthesized
QVQLQESGGGLVQAGGSLRLSCAASGTIFDEMGWYRQAPGKERELVASITLGSSTNYADSVKGRFTISRDNAKNTVYLQMNSLKPEDTAVYYCAVRRIPYFWVPYRTSYFHRYWGQGTQVTVSS

SEQ ID NO: 40525 - protein, 122 aa, Artificial Sequence
  Chemically Synthesized
QVQLQESGGGLVQAGGSLRLSCAASGNIFFYSRMGWYRQAPGKERELVASISFGATTNYADSVKGRFTISRDNAKNTVYLQMNSLKPEDTAVYYCAVWFDSSDTGVTPYAYWGQGTQVTVSS

SEQ ID NO: 40526 - protein, 122 aa, Artificial Sequence
  Chemically Synthesized
QVQLQESGGGLVQAGGSLRLSCAASGNISYYRTMGWYRQAPGKEREFVASIGGGGNTYYADSVKGRFTISRDNAKNTVYLQMNSLKPEDTAVYYCAVQLDDYWQIWDVHRYWGQGTQVTVSS

SEQ ID NO: 40527 - protein, 122 aa, Artificial Sequence
  Chemically Synthesized
QVQLQESGGGLVQAGGSLRLSCAASGTIFRLYYMGWYRQAPGKERELVATINIGASTYYADSVKGRFTISRDNAKNTVYLQMNSLKPEDTAVYYCAGWCCYLPFTTGVYYYWGQGTQVTVSS

SEQ ID NO: 40528 - protein, 126 aa, Artificial Sequence
  Chemically Synthesized
QVQLQESGGGLVQAGGSLRLSCAASGTISYYRYMGWYRQAPGKERELVATIGYGSSTYYADSVKGRFTISRDNAKNTVYLQMNSLKPEDTAVYYCAALPRRYLQYYGYDTRFFLYWGQGTQVTVSS

SEQ ID NO: 40529 - protein, 110 aa, Artificial Sequence
  Chemically Synthesized
QVQLQESGGGLVQAGGSLRLSCAASGTIFRGYYMGWYRQAPGKERELVATIAPGTSTNYADSVKGRFTISRDNAKNTVYLQMNSLKPEDTAVYYCAHSYWGQGTQVTVSS

SEQ ID NO: 40530 - protein, 118 aa, Artificial Sequence
  Chemically Synthesized
QVQLQESGGGLVQAGGSLRLSCAASGTISRGYVMGWYRQAPGKEREFVASITKGGSTNYADSVKGRFTISRDNAKNTVYLQMNSLKPEDTAVYYCAVGAFFPLSHAYWGQGTQVTVSS

SEQ ID NO: 40531 - protein, 118 aa, Artificial Sequence
  Chemically Synthesized
QVQLQESGGGLVQAGGSLRLSCAASGNISWARVMGWYRQAPGKERELVAAINAGGSTYYADSVKGRFTISRDNAKNTVYLQMNSLKPEDTAVYYCAARYAFYRKHYYWGQGTQVTVSS

SEQ ID NO: 40532 - protein, 118 aa, Artificial Sequence
  Chemically Synthesized
QVQLQESGGGLVQAGGSLRLSCAASGTISTVGRMGWYRQAPGKEREFVASIGRGTNTNYADSVKGRFTISRDNAKNTVYLQMNSLKPEDTAVYYCAAYNWYSYYFSYWGQGTQVTVSS

SEQ ID NO: 40533 - protein, 121 aa, Artificial Sequence
  Chemically Synthesized
QVQLQESGGGLVQAGGSLRLSCAASGTISLKYMGWYRQAPGKEREFVAAISDGTSTYYADSVKGRFTISRDNAKNTVYLQMNSLKPEDTAVYYCAVSTWYYAHEYDLLDYWGQGTQVTVSS

SEQ ID NO: 40534 - protein, 126 aa, Artificial Sequence
  Chemically Synthesized
QVQLQESGGGLVQAGGSLRLSCAASGSIFPNDYMGWYRQAPGKERELVAAISLGASTYYADSVKGRFTISRDNAKNTVYLQMNSLKPEDTAVYYCAAKLRVNDYAPAREYLHHHYWGQGTQVTVSS

SEQ ID NO: 40535 - protein, 126 aa, Artificial Sequence
  Chemically Synthesized
QVQLQESGGGLVQAGGSLRLSCAASGSIFPYVFMGWYRQAPGKERELVAGINQGGTTNYADSVKGRFTISRDNAKNTVYLQMNSLKPEDTAVYYCAADNTWGDGLLQYQGDDYSYWGQGTQVTVSS

SEQ ID NO: 40536 - protein, 116 aa, Artificial Sequence
  Chemically Synthesized
QVQLQESGGGLVQAGGSLRLSCAASGNIFYYGKMGWYRQAPGKERELVATIAEGTNTYYADSVKGRFTISRDNAKNTVYLQMNSLKPEDTAVYYCAVLYPADYDYWGQGTQVTVSS

SEQ ID NO: 40537 - protein, 122 aa, Artificial Sequence
  Chemically Synthesized
QVQLQESGGGLVQAGGSLRLSCAASGSIFIYVYMGWYRQAPGKEREFVAAINYGANTYYADSVKGRFTISRDNAKNTVYLQMNSLKPEDTAVYYCAAVYGSYPDPSRGYTYWGQGTQVTVSS

SEQ ID NO: 40538 - protein, 122 aa, Artificial Sequence
  Chemically Synthesized
QVQLQESGGGLVQAGGSLRLSCAASGSISQYYYMGWYRQAPGKERELVASIDYGSNTYYADSVKGRFTISRDNAKNTVYLQMNSLKPEDTAVYYCAAPDPTLIYRPYPHAYWGQGTQVTVSS

SEQ ID NO: 40539 - protein, 122 aa, Artificial Sequence
  Chemically Synthesized
QVQLQESGGGLVQAGGSLRLSCAASGSIFDYGGMGWYRQAPGKERELVASITAGGSTNYADSVKGRFTISRDNAKNTVYLQMNSLKPEDTAVYYCAVLQAHNQRRSTNYAYWGQGTQVTVSS

SEQ ID NO: 40540 - protein, 118 aa, Artificial Sequence
  Chemically Synthesized
QVQLQESGGGLVQAGGSLRLSCAASGTISVQGTMGWYRQAPGKERELVASIALGGTTYYADSVKGRFTISRDNAKNTVYLQMNSLKPEDTAVYYCAVDGGKPDGLYYWGQGTQVTVSS

SEQ ID NO: 40541 - protein, 107 aa, Artificial Sequence
  Chemically Synthesized
QVQLQESGGGLVQAGGSLRLSCAASGSISASYSMGWYRQAPGKERELVVVPYADSVKGRFTISRDNAKNTVYLQMNSLKPEDTAVYYCAAALRFYYWGQGTQVTVSS

SEQ ID NO: 40542 - protein, 118 aa, Artificial Sequence
  Chemically Synthesized
QVQLQESGGGLVQAGGSLRLSCAASGTISSFDSMGWYRQAPGKEREFVAAIGAGSNTYYADSVKGRFTISRDNAKNTVYLQMNSLKPEDTAVYYCAALQDDQIHLSYWGQGTQVTVSS

SEQ ID NO: 40543 - protein, 113 aa, Artificial Sequence
  Chemically Synthesized
QVQLQESGGGLVQAGGSLRLSCAASGTIFQADNIMGWYRQAPGKERELVASIAYGSTTYYADSVKGRFTISRDNAKNTVYLQMNSLKPEDTAVYYCARDHYYWGQGTQVTVSS

SEQ ID NO: 40544 - protein, 118 aa, Artificial Sequence
  Chemically Synthesized
QVQLQESGGGLVQAGGSLRLSCAASGTIFRGIYMGWYRQAPGKERELVATIAYGTTTYYADSVKGRFTISRDNAKNTVYLQMNSLKPEDTAVYYCAAYVDRGSWYVYWGQGTQVTVSS

SEQ ID NO: 40545 - protein, 122 aa, Artificial Sequence
  Chemically Synthesized
QVQLQESGGGLVQAGGSLRLSCAASGSISLIWGMGWYRQAPGKERELVAAIDIGANTNYADSVKGRFTISRDNAKNTVYLQMNSLKPEDTAVYYCAVWTYNYIRRYSDYDYWGQGTQVTVSS

SEQ ID NO: 40546 - protein, 116 aa, Artificial Sequence
  Chemically Synthesized
QVQLQESGGGLVQAGGSLRLSCAASGYCSAWMGWYRQAPGKERELVAAITFGSTTNYADSVKGRFTISRDNAKNTVYLQMNSLKPEDTAVYYCAVAYSQRGDYDYWGQGTQVTVSS

SEQ ID NO: 40547 - protein, 118 aa, Artificial Sequence
  Chemically Synthesized
QVQLQESGGGLVQAGGSLRLSCAASGYISQQYYMGWYRQAPGKERELVAGINQGTTTNYADSVKGRFTISRDNAKNTVYLQMNSLKPEDTAVYYCAVDYAYQSRLDYWGQGTQVTVSS

SEQ ID NO: 40548 - protein, 122 aa, Artificial Sequence
  Chemically Synthesized
QVQLQESGGGLVQAGGSLRLSCAASGNISVSNNMGWYRQAPGKERELVASIGYGGSTNYADSVKGRFTISRDNAKNTVYLQMNSLKPEDTAVYYCAAGLNATDYQAYTLSYWGQGTQVTVSS

SEQ ID NO: 40549 - protein, 117 aa, Artificial Sequence
  Chemically Synthesized
QVQLQESGGGLVQAGGSLRLSCAASGTISGVRYMGWYRQAPGKEREFVAGIALGGSTNYADSVKGRFTISRDNAKNTVYLQMNSLKPEDTAVYYCAVYYYYDSHAYWGQGTQVTVSS

SEQ ID NO: 40550 - protein, 118 aa, Artificial Sequence
  Chemically Synthesized
QVQLQESGGGLVQAGGSLRLSCAASGTIFWDVVMGWYRQAPGKEREFVASITTGTSTNYADSVKGRFTISRDNAKNTVYLQMNSLKPEDTAVYYCAVDYSLDNRFAYWGQGTQVTVSS

SEQ ID NO: 40551 - protein, 116 aa, Artificial Sequence
  Chemically Synthesized
QVQLQESGGGLVQAGGSLRLSCAASGTIFGTQFMGWYRQAPGKEREFVAAIVVVLPYADSVKGRFTISRDNAKNTVYLQMNSLKPEDTAVYYCAANDYKTAPFGYWGQGTQVTVSS

SEQ ID NO: 40552 - protein, 121 aa, Artificial Sequence
  Chemically Synthesized
QVQLQESGGGLVQAGGSLRLSCAASGYIFGSPVMGWYRQAPGKEREFVATISAGGITYYADSVKGRFTISRDNAKNTVYLQMNSLKPEDTAVYYCAVQTYDDYYYWTVHYWGQGTQVTVSS

SEQ ID NO: 40553 - protein, 122 aa, Artificial Sequence
  Chemically Synthesized
QVQLQESGGGLVQAGGSLRLSCAASGTISWARYMGWYRQAPGKERELVAAINGGSNTNYADSVKGRFTISRDNAKNTVYLQMNSLKPEDTAVYYCAAYDIDAEYRYGNHSYWGQGTQVTVSS

SEQ ID NO: 40554 - protein, 118 aa, Artificial Sequence
  Chemically Synthesized
QVQLQESGGGLVQAGGSLRLSCAASGYIFTTWYMGWYRQAPGKERELVATIDSVVLPYADSVKGRFTISRDNAKNTVYLQMNSLKPEDTAVYYCAAPDGDYHPSHRYWGQGTQVTVSS

SEQ ID NO: 40555 - protein, 118 aa, Artificial Sequence
  Chemically Synthesized
QVQLQESGGGLVQAGGSLRLSCAASGYISDAFEMGWYRQAPGKERELVAGIGRGGTTYYADSVKGRFTISRDNAKNTVYLQMNSLKPEDTAVYYCAAYDLTYYPLAYWGQGTQVTVSS

SEQ ID NO: 40556 - protein, 121 aa, Artificial Sequence
  Chemically Synthesized
QVQLQESGGGLVQAGGSLRLSCAASGYSGHDVMGWYRQAPGKERELVASINDGSNTYYADSVKGRFTISRDNAKNTVYLQMNSLKPEDTAVYYCAAWTIQTANLRYTYSYWGQGTQVTVSS

SEQ ID NO: 40557 - protein, 122 aa, Artificial Sequence
  Chemically Synthesized
QVQLQESGGGLVQAGGSLRLSCAASGTISYDQIMGWYRQAPGKEREFVAGISYGGITYYADSVKGRFTISRDNAKNTVYLQMNSLKPEDTAVYYCAAVPYTEIADSPRFEYWGQGTQVTVSS

SEQ ID NO: 40558 - protein, 121 aa, Artificial Sequence
  Chemically Synthesized
QVQLQESGGGLVQAGGSLRLSCAASGTISSRTMGWYRQAPGKEREFVATITAGAITYYADSVKGRFTISRDNAKNTVYLQMNSLKPEDTAVYYCAVVGRARYEYYVVLAYWGQGTQVTVSS

SEQ ID NO: 40559 - protein, 118 aa, Artificial Sequence
  Chemically Synthesized
QVQLQESGGGLVQAGGSLRLSCAASGTIFRVAKMGWYRQAPGKERELVAAIDAGASTYYADSVKGRFTISRDNAKNTVYLQMNSLKPEDTAVYYCAARRYYGSRHIYWGQGTQVTVSS

SEQ ID NO: 40560 - protein, 118 aa, Artificial Sequence
  Chemically Synthesized
QVQLQESGGGLVQAGGSLRLSCAASGNIFDPYVMGWYRQAPGKERELVAGISTGAITNYADSVKGRFTISRDNAKNTVYLQMNSLKPEDTAVYYCAVYVYRADDLSYWGQGTQVTVSS

SEQ ID NO: 40561 - protein, 122 aa, Artificial Sequence
  Chemically Synthesized
QVQLQESGGGLVQAGGSLRLSCAASGYISTWDGMGWYRQAPGKEREFVAAISAGGTTNYADSVKGRFTISRDNAKNTVYLQMNSLKPEDTAVYYCAAYYSDEHTTAVFLAYWGQGTQVTVSS

SEQ ID NO: 40562 - protein, 112 aa, Artificial Sequence
  Chemically Synthesized
QVQLQESGGGLVQAGGSLRLSCAASGSISLDAAMGWYRQAPGKERELVATINDGANTYYADSVKGRFTISRDNAKNTVYLQMNSLKPEDTAVYYCATKTIYWGQGTQVTVSS

SEQ ID NO: 40563 - protein, 118 aa, Artificial Sequence
  Chemically Synthesized
QVQLQESGGGLVQAGGSLRLSCAASGTISVLPYMGWYRQAPGKERELVASIAYGTSTNYADSVKGRFTISRDNAKNTVYLQMNSLKPEDTAVYYCAVEDNDPPYFDYWGQGTQVTVSS

SEQ ID NO: 40564 - protein, 122 aa, Artificial Sequence
  Chemically Synthesized
QVQLQESGGGLVQAGGSLRLSCAASGSISSYDYMGWYRQAPGKERELVAGITAGGNTYYADSVKGRFTISRDNAKNTVYLQMNSLKPEDTAVYYCAALGYRDTPSTRYYGYWGQGTQVTVSS

SEQ ID NO: 40565 - protein, 122 aa, Artificial Sequence
  Chemically Synthesized
QVQLQESGGGLVQAGGSLRLSCAASGSISSYDYMGWYRQAPGKERELVASIAYGTSTNYADSVKGRFTISRDNAKNTVYLQMNSLKPEDTAVYYCAALGYRDTPSTRYYGYWGQGTQVTVSS

SEQ ID NO: 40566 - protein, 116 aa, Artificial Sequence
  Chemically Synthesized
QVQLQESGGGLVQAGGSLRLSCAASGTIFDEGWMGWYRQAPGKEREFVAGIALGATTYYADSVKGRFTISRDNAKNTVYLQMNSLKPEDTAVYYCAVATYNQHDYWGQGTQVTVSS

SEQ ID NO: 40567 - protein, 122 aa, Artificial Sequence
  Chemically Synthesized
QVQLQESGGGLVQAGGSLRLSCAASGTIFSDGYMGWYRQAPGKERELVAGIAWGSSTYYADSVKGRFTISRDNAKNTVYLQMNSLKPEDTAVYYCAVGATDYGGDDGYHSYWGQGTQVTVSS

SEQ ID NO: 40568 - protein, 110 aa, Artificial Sequence
  Chemically Synthesized
QVQLQESGGGLVQAGGSLRLSCAASGSIFDRYDMGWYRQAPGKERELVAGITAGGSTYADSVKGRFTISRDNAKNTVYLQMNSLKPEDTAVYYCATTLYWGQGTQVTVSS

SEQ ID NO: 40569 - protein, 117 aa, Artificial Sequence
  Chemically Synthesized
QVQLQESGGGLVQAGGSLRLSCAASGSISRGYYMGWYRQAPGKEREFVAGIDPGTTTYYADSVKGRFTISRDNAKNTVYLQMNSLKPEDTAVYYCAVEHSGSWHDYWGQGTQVTVSS

SEQ ID NO: 40570 - protein, 118 aa, Artificial Sequence
  Chemically Synthesized
QVQLQESGGGLVQAGGSLRLSCAASGSIFETRYMGWYRQAPGKEREFVATISVGTNTNYADSVKGRFTISRDNAKNTVYLQMNSLKPEDTAVYYCAVEDNDPPYFDYWGQGTQVTVSS

SEQ ID NO: 40571 - protein, 118 aa, Artificial Sequence
  Chemically Synthesized
QVQLQESGGGLVQAGGSLRLSCAASGTIFSRGYMGWYRQAPGKERELVASIGPGGTTYYADSVKGRFTISRDNAKNTVYLQMNSLKPEDTAVYYCAAYDDALYLHTYWGQGTQVTVSS

SEQ ID NO: 40572 - protein, 121 aa, Artificial Sequence
  Chemically Synthesized
QVQLQESGGGLVQAGGSLRLSCAASGNISSVSNMGWYRQAPGKEREFVAAISNGANTNYADSVKGRFTISRDNAKNTVYLQMNSLKPEDTAVYYCAVHWRSSLHLRYSSYWGQGTQVTVSS

SEQ ID NO: 40573 - protein, 113 aa, Artificial Sequence
  Chemically Synthesized
QVQLQESGGGLVQAGGSLRLSCAASGSIFHAVLMGWYRQAPGKERELVASISDGSTTYYADSVKGRFTISRDNAKNTVYLQMNSLKPEDTAVYYCAATVFMYWGQGTQVTVSS

SEQ ID NO: 40574 - protein, 118 aa, Artificial Sequence
  Chemically Synthesized
QVQLQESGGGLVQAGGSLRLSCAASGNISDPDIMGWYRQAPGKEREFVAAIGDGANTNYADSVKGRFTISRDNAKNTVYLQMNSLKPEDTAVYYCAVYYGQYDVFLYWGQGTQVTVSS

SEQ ID NO: 40575 - protein, 118 aa, Artificial Sequence
  Chemically Synthesized
QVQLQESGGGLVQAGGSLRLSCAASGNIFFSVYMGWYRQAPGKERELVAGINRGTTTYYADSVKGRFTISRDNAKNTVYLQMNSLKPEDTAVYYCAADTGIYYWHVYWGQGTQVTVSS

SEQ ID NO: 40576 - protein, 117 aa, Artificial Sequence
  Chemically Synthesized
QVQLQESGGGLVQAGGSLRLSCAASGTISREVVMGWYRQAPGKERELVAGINKGATTNYADSVKGRFTISRDNAKNTVYLQMNSLKPEDTAVYYCAVRDALTLTIYWGQGTQVTVSS

SEQ ID NO: 40577 - protein, 118 aa, Artificial Sequence
  Chemically Synthesized
QVQLQESGGGLVQAGGSLRLSCAASGYISPSPYMGWYRQAPGKERELVASIGYGGNTYYADSVKGRFTISRDNAKNTVYLQMNSLKPEDTAVYYCAAYGGDASRLDYWGQGTQVTVSS

SEQ ID NO: 40578 - protein, 118 aa, Artificial Sequence
  Chemically Synthesized
QVQLQESGGGLVQAGGSLRLSCAASGYISYIYYMGWYRQAPGKERELVATIAYGANTYYADSVKGRFTISRDNAKNTVYLQMNSLKPEDTAVYYCAVRNDFYHPHYYWGQGTQVTVSS

SEQ ID NO: 40579 - protein, 122 aa, Artificial Sequence
  Chemically Synthesized
QVQLQESGGGLVQAGGSLRLSCAASGNISLWFDMGWYRQAPGKERELVATISYGSSTNYADSVKGRFTISRDNAKNTVYLQMNSLKPEDTAVYYCAAYDERQYTVYDDLHYWGQGTQVTVSS

SEQ ID NO: 40580 - protein, 117 aa, Artificial Sequence
  Chemically Synthesized
QVQLQESGGGLVQAGGSLRLSCAASGYIFPFYYMGWYRQAPGKEREFVATIAYGGNTNYADSVKGRFTISRDNAKNTVYLQMNSLKPEDTAVYYCAVSCTVVVNLYWGQGTQVTVSS

SEQ ID NO: 40581 - protein, 126 aa, Artificial Sequence
  Chemically Synthesized
QVQLQESGGGLVQAGGSLRLSCAASGTISAFDGMGWYRQAPGKERELVATINGGSTTYYADSVKGRFTISRDNAKNTVYLQMNSLKPEDTAVYYCAVPYDVYNGRYIEETRDHDYWGQGTQVTVSS

SEQ ID NO: 40582 - protein, 126 aa, Artificial Sequence
  Chemically Synthesized
QVQLQESGGGLVQAGGSLRLSCAASGSISYDEYMGWYRQAPGKERELVAAIDGGGNTNYADSVKGRFTISRDNAKNTVYLQMNSLKPEDTAVYYCAAVRYSSLDAGSHLVDILYYWGQGTQVTVSS

SEQ ID NO: 40583 - protein, 121 aa, Artificial Sequence
  Chemically Synthesized
QVQLQESGGGLVQAGGSLRLSCAASGSISRTAAMGWYRQAPGKERELVAGISGGTTNYADSVKGRFTISRDNAKNTVYLQMNSLKPEDTAVYYCAAVDPVAKDVPPYHGYWGQGTQVTVSS

SEQ ID NO: 40584 - protein, 120 aa, Artificial Sequence
  Chemically Synthesized
QVQLQESGGGLVQAGGSLRLSCAASGSISTPRIMGWYRQAPGKERELVATIAYGALPYADSVKGRFTISRDNAKNTVYLQMNSLKPEDTAVYYCAAWPIDNNLDYVLGYWGQGTQVTVSS

SEQ ID NO: 40585 - protein, 118 aa, Artificial Sequence
  Chemically Synthesized
QVQLQESGGGLVQAGGSLRLSCAASGSISSYTYMGWYRQAPGKERELVAAIALGGNTYYADSVKGRFTISRDNAKNTVYLQMNSLKPEDTAVYYCAVQTHWTRYFDYWGQGTQVTVSS

SEQ ID NO: 40586 - protein, 121 aa, Artificial Sequence
  Chemically Synthesized
QVQLQESGGGLVQAGGSLRLSCAASGSISSYYVMGWYRQAPGKERELVAAIALGGTTNYADSVKGRFTISRDNAKNTVYLQMNSLKPEDTAVYYCAVAVGTFVGTYYYYYWGQGTQVTVSS

SEQ ID NO: 40587 - protein, 118 aa, Artificial Sequence
  Chemically Synthesized
QVQLQESGGGLVQAGGSLRLSCAASGYIFLDSSMGWYRQAPGKERELVASIATGASTNYADSVKGRFTISRDNAKNTVYLQMNSLKPEDTAVYYCAAYTDDYLELSYWGQGTQVTVSS

SEQ ID NO: 40588 - protein, 121 aa, Artificial Sequence
  Chemically Synthesized
QVQLQESGGGLVQAGGSLRLSCAASGNISRPVNMGWYRQAPGKERELVATIDVGSTTNYADSVKGRFTISRDNAKNTVYLQMNSLKPEDTAVYYCAAAPDKDGHDDWLLYWGQGTQVTVSS

SEQ ID NO: 40589 - protein, 122 aa, Artificial Sequence
  Chemically Synthesized
QVQLQESGGGLVQAGGSLRLSCAASGTISPTYDMGWYRQAPGKEREFVATIGSGATTYYADSVKGRFTISRDNAKNTVYLQMNSLKPEDTAVYYCAADGAAYRYDADGFQYWGQGTQVTVSS

SEQ ID NO: 40590 - protein, 122 aa, Artificial Sequence
  Chemically Synthesized
QVQLQESGGGLVQAGGSLRLSCAASGSISVRDTMGWYRQAPGKEREFVAAIGYGASTYYADSVKGRFTISRDNAKNTVYLQMNSLKPEDTAVYYCAAELYIRIRYDDGYDYWGQGTQVTVSS

SEQ ID NO: 40591 - protein, 118 aa, Artificial Sequence
  Chemically Synthesized
QVQLQESGGGLVQAGGSLRLSCAASGSIFGVPNMGWYRQAPGKERELVASIAAGSTTNYADSVKGRFTISRDNAKNTVYLQMNSLKPEDTAVYYCAVAIVRGYPYKYWGQGTQVTVSS

SEQ ID NO: 40592 - protein, 118 aa, Artificial Sequence
  Chemically Synthesized
QVQLQESGGGLVQAGGSLRLSCAASGNISAAGAMGWYRQAPGKERELVAAIGAGGSTYYADSVKGRFTISRDNAKNTVYLQMNSLKPEDTAVYYCAARYSGVEDLLYWGQGTQVTVSS

SEQ ID NO: 40593 - protein, 118 aa, Artificial Sequence
  Chemically Synthesized
QVQLQESGGGLVQAGGSLRLSCAASGTISLPYIMGWYRQAPGKEREFVAAIAYGGSTYYADSVKGRFTISRDNAKNTVYLQMNSLKPEDTAVYYCAVRSRYDWLYTYWGQGTQVTVSS

SEQ ID NO: 40594 - protein, 117 aa, Artificial Sequence
  Chemically Synthesized
QVQLQESGGGLVQAGGSLRLSCAASGYISSYTYMGWYRQAPGKERELVAAISVGGNTNYADSVKGRFTISRDNAKNTVYLQMNSLKPEDTAVYYCAVYEVYIDTYYWGQGTQVTVSS

SEQ ID NO: 40595 - protein, 126 aa, Artificial Sequence
  Chemically Synthesized
QVQLQESGGGLVQAGGSLRLSCAASGSISPYDTMGWYRQAPGKEREFVATISSGGITNYADSVKGRFTISRDNAKNTVYLQMNSLKPEDTAVYYCAVYYYYYVQQGRLDSRSLNYWGQGTQVTVSS

SEQ ID NO: 40596 - protein, 121 aa, Artificial Sequence
  Chemically Synthesized
QVQLQESGGGLVQAGGSLRLSCAASGTIFNHTPMGWYRQAPGKERELVAGIDYGATTNYADSVKGRFTISRDNAKNTVYLQMNSLKPEDTAVYYCAVNYLHYDSRTFTMYWGQGTQVTVSS

SEQ ID NO: 40597 - protein, 117 aa, Artificial Sequence
  Chemically Synthesized
QVQLQESGGGLVQAGGSLRLSCAASGTIFTVFMGWYRQAPGKERELVAAIDYGGSTYYADSVKGRFTISRDNAKNTVYLQMNSLKPEDTAVYYCAVYSLNRFGFAYWGQGTQVTVSS

SEQ ID NO: 40598 - protein, 118 aa, Artificial Sequence
  Chemically Synthesized
QVQLQESGGGLVQAGGSLRLSCAASGTISVRRRMGWYRQAPGKERELVAAISYGTTTYYADSVKGRFTISRDNAKNTVYLQMNSLKPEDTAVYYCAVYAYKSPYFGYWGQGTQVTVSS

SEQ ID NO: 40599 - protein, 118 aa, Artificial Sequence
  Chemically Synthesized
QVQLQESGGGLVQAGGSLRLSCAASGTIFYSDSMGWYRQAPGKERELVAGIADGATTNYADSVKGRFTISRDNAKNTVYLQMNSLKPEDTAVYYCAARYFSALRHYYWGQGTQVTVSS

SEQ ID NO: 40600 - protein, 118 aa, Artificial Sequence
  Chemically Synthesized
QVQLQESGGGLVQAGGSLRLSCAASGYIFPDYAMGWYRQAPGKERELVAAIGWGWYYQYADSVKGRFTISRDNAKNTVYLQMNSLKPEDTAVYYCAAAGYFGTEFGYWGQGTQVTVSS

SEQ ID NO: 40601 - protein, 121 aa, Artificial Sequence
  Chemically Synthesized
QVQLQESGGGLVQAGGSLRLSCAASGSIFEYPYMGWYRQAPGKERELVAAIDVVLIPYADSVKGRFTISRDNAKNTVYLQMNSLKPEDTAVYYCAANIRLDHLEIKVHYYWGQGTQVTVSS

SEQ ID NO: 40602 - protein, 123 aa, Artificial Sequence
  Chemically Synthesized
QVQLQESGGGLVQAGGSLRLSCAASGSIFSTVMGWYRQAPGKEREFVASISYGTNTNYADSVKGRFTISRDNAKNTVYLQMNSLKPEDTAVYYCAVYDYYWKHDHAGANHVYWGQGTQVTVSS

SEQ ID NO: 40603 - protein, 120 aa, Artificial Sequence
  Chemically Synthesized
QVQLQESGGGLVQAGGSLRLSCAASGNISAGLDMGWYRQAPGKERELVAAIAYGTSTNYADSVKGRFTISRDNAKNTVYLQMNSLKPEDTAVYYCAVRPSLDYVGAYHYWGQGTQVTVSS

SEQ ID NO: 40604 - protein, 118 aa, Artificial Sequence
  Chemically Synthesized
QVQLQESGGGLVQAGGSLRLSCAASGNIFYPPIMGWYRQAPGKEREFVAAINDGSSTNYADSVKGRFTISRDNAKNTVYLQMNSLKPEDTAVYYCAVYYYQPVNLLYWGQGTQVTVSS

SEQ ID NO: 40605 - protein, 121 aa, Artificial Sequence
  Chemically Synthesized
QVQLQESGGGLVQAGGSLRLSCAASGSIFDPGGMGWYRQAPGKERELVATIAAGSSTYYADSVKGRFTISRDNAKNTVYLQMNSLKPEDTAVYYCAVTCTTRFMTVTSIYWGQGTQVTVSS

SEQ ID NO: 40606 - protein, 118 aa, Artificial Sequence
  Chemically Synthesized
QVQLQESGGGLVQAGGSLRLSCAASGYIFAGYYMGWYRQAPGKEREFVATITDGASTNYADSVKGRFTISRDNAKNTVYLQMNSLKPEDTAVYYCAAWETYDYVHYYWGQGTQVTVSS

SEQ ID NO: 40607 - protein, 122 aa, Artificial Sequence
  Chemically Synthesized
QVQLQESGGGLVQAGGSLRLSCAASGSISYGWYMGWYRQAPGKEREFVATIAYGGITYYADSVKGRFTISRDNAKNTVYLQMNSLKPEDTAVYYCAVVTSTYPYLKRVHRYWGQGTQVTVSS

SEQ ID NO: 40608 - protein, 118 aa, Artificial Sequence
  Chemically Synthesized
QVQLQESGGGLVQAGGSLRLSCAASGSISDDIDMGWYRQAPGKERELVASIGQGGNTNYADSVKGRFTISRDNAKNTVYLQMNSLKPEDTAVYYCAVGSNTRSGYYYWGQGTQVTVSS

SEQ ID NO: 40609 - protein, 122 aa, Artificial Sequence
  Chemically Synthesized
QVQLQESGGGLVQAGGSLRLSCAASGSISPYYYMGWYRQAPGKEREFVASISIGGNTYYADSVKGRFTISRDNAKNTVYLQMNSLKPEDTAVYYCAAGIYFTYDYGNWLYYWGQGTQVTVSS

SEQ ID NO: 40610 - protein, 126 aa, Artificial Sequence
  Chemically Synthesized
QVQLQESGGGLVQAGGSLRLSCAASGTIFVDVIMGWYRQAPGKEREFVAAITLGTITYYADSVKGRFTISRDNAKNTVYLQMNSLKPEDTAVYYCAAKFGPRYDAPVTTTYWHLYWGQGTQVTVSS

SEQ ID NO: 40611 - protein, 122 aa, Artificial Sequence
  Chemically Synthesized
QVQLQESGGGLVQAGGSLRLSCAASGSIFSDAYMGWYRQAPGKEREFVASITGGGNTYYADSVKGRFTISRDNAKNTVYLQMNSLKPEDTAVYYCAAYYVPYDGYYRQHPYWGQGTQVTVSS

SEQ ID NO: 40612 - protein, 126 aa, Artificial Sequence
  Chemically Synthesized
QVQLQESGGGLVQAGGSLRLSCAASGSIFGVRGMGWYRQAPGKEREFVASIAKGGTTYYADSVKGRFTISRDNAKNTVYLQMNSLKPEDTAVYYCAVYQRYQDERYIAAYHELDYWGQGTQVTVSS

SEQ ID NO: 40613 - protein, 118 aa, Artificial Sequence
  Chemically Synthesized
QVQLQESGGGLVQAGGSLRLSCAASGNISALGWMGWYRQAPGKEREFVAGINVGTITYYADSVKGRFTISRDNAKNTVYLQMNSLKPEDTAVYYCAVGTYYDNAYYYWGQGTQVTVSS

SEQ ID NO: 40614 - protein, 122 aa, Artificial Sequence
  Chemically Synthesized
QVQLQESGGGLVQAGGSLRLSCAASGNIFIIYAMGWYRQAPGKERELVATITVGATTYYADSVKGRFTISRDNAKNTVYLQMNSLKPEDTAVYYCAATYPTYGDIVWSHDYWGQGTQVTVSS

SEQ ID NO: 40615 - protein, 122 aa, Artificial Sequence
  Chemically Synthesized
QVQLQESGGGLVQAGGSLRLSCAASGSIFNSTYMGWYRQAPGKERELVAAIDDGTSTNYADSVKGRFTISRDNAKNTVYLQMNSLKPEDTAVYYCAAYLHYLKGWVGTHDYWGQGTQVTVSS

SEQ ID NO: 40616 - protein, 118 aa, Artificial Sequence
  Chemically Synthesized
QVQLQESGGGLVQAGGSLRLSCAASGTISARPIMGWYRQAPGKERELVAAIDDGGNTNYADSVKGRFTISRDNAKNTVYLQMNSLKPEDTAVYYCAVDFLREFEHPYWGQGTQVTVSS

SEQ ID NO: 40617 - protein, 118 aa, Artificial Sequence
  Chemically Synthesized
QVQLQESGGGLVQAGGSLRLSCAASGNIFLGDNMGWYRQAPGKERELVAAIAFGSNTNYADSVKGRFTISRDNAKNTVYLQMNSLKPEDTAVYYCAAYRVVDDYHPYWGQGTQVTVSS

SEQ ID NO: 40618 - protein, 121 aa, Artificial Sequence
  Chemically Synthesized
QVQLQESGGGLVQAGGSLRLSCAASGTISAGYDMGWYRQAPGKERELVASIAFGSTTYYADSVKGRFTISRDNAKNTVYLQMNSLKPEDTAVYYCAVYKTYDYVPTRHKYWGQGTQVTVSS

SEQ ID NO: 40619 - protein, 122 aa, Artificial Sequence
  Chemically Synthesized
QVQLQESGGGLVQAGGSLRLSCAASGTIFYLYYMGWYRQAPGKEREFVAAIAAGGNTYYADSVKGRFTISRDNAKNTVYLQMNSLKPEDTAVYYCAVTPDWRRYGLRYYSYWGQGTQVTVSS

SEQ ID NO: 40620 - protein, 122 aa, Artificial Sequence
  Chemically Synthesized
QVQLQESGGGLVQAGGSLRLSCAASGNIFLERSMGWYRQAPGKEREFVAGISYGGTTYYADSVKGRFTISRDNAKNTVYLQMNSLKPEDTAVYYCAAQDIEPVGVDIYHPYWGQGTQVTVSS

SEQ ID NO: 40621 - protein, 122 aa, Artificial Sequence
  Chemically Synthesized
QVQLQESGGGLVQAGGSLRLSCAASGYIFGYHVMGWYRQAPGKEREFVASISDGASTYYADSVKGRFTISRDNAKNTVYLQMNSLKPEDTAVYYCAAYGQYEFVDGQFLAYWGQGTQVTVSS

SEQ ID NO: 40622 - protein, 114 aa, Artificial Sequence
  Chemically Synthesized
QVQLQESGGGLVQAGGSLRLSCAASGNIFLRLNMGWYRQAPGKERELVASISYGSTYYADSVKGRFTISRDNAKNTVYLQMNSLKPEDTAVYYCAAGVWRLYYWGQGTQVTVSS

SEQ ID NO: 40623 - protein, 120 aa, Artificial Sequence
  Chemically Synthesized
QVQLQESGGGLVQAGGSLRLSCAASGSISQPAIMGWYRQAPGKERELVASIDDGSSTNYADSVKGRFTISRDNAKNTVYLQMNSLKPEDTAVYYCAVLDGDGSDDGFYYWGQGTQVTVSS

SEQ ID NO: 40624 - protein, 118 aa, Artificial Sequence
  Chemically Synthesized
QVQLQESGGGLVQAGGSLRLSCAASGNIFYWRDMGWYRQAPGKEREFVATIGAGSSTYYADSVKGRFTISRDNAKNTVYLQMNSLKPEDTAVYYCAVDQLTYYLLGYWGQGTQVTVSS

SEQ ID NO: 40625 - protein, 118 aa, Artificial Sequence
  Chemically Synthesized
QVQLQESGGGLVQAGGSLRLSCAASGNISGGNGMGWYRQAPGKEREFVAAISLGGTTNYADSVKGRFTISRDNAKNTVYLQMNSLKPEDTAVYYCAASDLYDLYFTYWGQGTQVTVSS

SEQ ID NO: 40626 - protein, 121 aa, Artificial Sequence
  Chemically Synthesized
QVQLQESGGGLVQAGGSLRLSCAASGTISIQFMGWYRQAPGKEREFVAGITAGSSTYYADSVKGRFTISRDNAKNTVYLQMNSLKPEDTAVYYCAVSGTGESEGDADYDYWGQGTQVTVSS

SEQ ID NO: 40627 - protein, 122 aa, Artificial Sequence
  Chemically Synthesized
QVQLQESGGGLVQAGGSLRLSCAASGTISEQHYMGWYRQAPGKERELVAGIDWGANTNYADSVKGRFTISRDNAKNTVYLQMNSLKPEDTAVYYCAAGNLGGSTDLPSHNYWGQGTQVTVSS

SEQ ID NO: 40628 - protein, 118 aa, Artificial Sequence
  Chemically Synthesized
QVQLQESGGGLVQAGGSLRLSCAASGNIFAVASMGWYRQAPGKEREFVAGIAAGATTNYADSVKGRFTISRDNAKNTVYLQMNSLKPEDTAVYYCAAYQYGLYYHGYWGQGTQVTVSS

SEQ ID NO: 40629 - protein, 126 aa, Artificial Sequence
  Chemically Synthesized
QVQLQESGGGLVQAGGSLRLSCAASGTISSYGNMGWYRQAPGKERELVAAISYGSSTYYADSVKGRFTISRDNAKNTVYLQMNSLKPEDTAVYYCAVQDDYTQIRYNRPGRDFPYWGQGTQVTVSS

SEQ ID NO: 40630 - protein, 118 aa, Artificial Sequence
  Chemically Synthesized
QVQLQESGGGLVQAGGSLRLSCAASGSISYSYYMGWYRQAPGKERELVASISFGAITNYADSVKGRFTISRDNAKNTVYLQMNSLKPEDTAVYYCAVYYLIDYAYGYWGQGTQVTVSS

SEQ ID NO: 40631 - protein, 118 aa, Artificial Sequence
  Chemically Synthesized
QVQLQESGGGLVQAGGSLRLSCAASGNISQRRAMGWYRQAPGKEREFVAGITYGTNTYYADSVKGRFTISRDNAKNTVYLQMNSLKPEDTAVYYCAVPYYSLYKHGYWGQGTQVTVSS

SEQ ID NO: 40632 - protein, 117 aa, Artificial Sequence
  Chemically Synthesized
QVQLQESGGGLVQAGGSLRLSCAASGTISADWPMGWYRQAPGKEREFVAAISWGTTTYYADSVKGRFTISRDNAKNTVYLQMNSLKPEDTAVYYCAVPGESLTSMYWGQGTQVTVSS

SEQ ID NO: 40633 - protein, 122 aa, Artificial Sequence
  Chemically Synthesized
QVQLQESGGGLVQAGGSLRLSCAASGTIFYAPSMGWYRQAPGKEREFVAAIDSGAITNYADSVKGRFTISRDNAKNTVYLQMNSLKPEDTAVYYCAADLAKYYASRVVFYYWGQGTQVTVSS

SEQ ID NO: 40634 - protein, 122 aa, Artificial Sequence
  Chemically Synthesized
QVQLQESGGGLVQAGGSLRLSCAASGNIFSRYTMGWYRQAPGKERELVASINLGAITYYADSVKGRFTISRDNAKNTVYLQMNSLKPEDTAVYYCAAWIDSTYYPRRGFPYWGQGTQVTVSS

SEQ ID NO: 40635 - protein, 126 aa, Artificial Sequence
  Chemically Synthesized
QVQLQESGGGLVQAGGSLRLSCAASGTIFDTRSMGWYRQAPGKERELVASIAYGTTTNYADSVKGRFTISRDNAKNTVYLQMNSLKPEDTAVYYCAVDYVDGSIYAVNYRWPFVYWGQGTQVTVSS

SEQ ID NO: 40636 - protein, 109 aa, Artificial Sequence
  Chemically Synthesized
QVQLQESGGGLVQAGGSLRLSCAASGNISSYDMGWYRQAPGKERELVAAIDYGGTTYYADSVKGRFTISRDNAKNTVYLQMNSLKPEDTAVYYCAHDYWGQGTQVTVSS

SEQ ID NO: 40637 - protein, 118 aa, Artificial Sequence
  Chemically Synthesized
QVQLQESGGGLVQAGGSLRLSCAASGSIFAAYYMGWYRQAPGKERELVAGISLGSITNYADSVKGRFTISRDNAKNTVYLQMNSLKPEDTAVYYCAAPHHKYAYFAYWGQGTQVTVSS

SEQ ID NO: 40638 - protein, 120 aa, Artificial Sequence
  Chemically Synthesized
QVQLQESGGGLVQAGGSLRLSCAASGNISWPAMGWYRQAPGKERELVAAITYGASTNYADSVKGRFTISRDNAKNTVYLQMNSLKPEDTAVYYCAASYTTVDDEDGFDYWGQGTQVTVSS

SEQ ID NO: 40639 - protein, 122 aa, Artificial Sequence
  Chemically Synthesized
QVQLQESGGGLVQAGGSLRLSCAASGNISSFSVMGWYRQAPGKERELVAGIAYGGTTYYADSVKGRFTISRDNAKNTVYLQMNSLKPEDTAVYYCAVWAQEDDAASYGLGYWGQGTQVTVSS

SEQ ID NO: 40640 - protein, 113 aa, Artificial Sequence
  Chemically Synthesized
QVQLQESGGGLVQAGGSLRLSCAASGNIFWYYMGWYRQAPGKEREFVAAIGVGGITNYADSVKGRFTISRDNAKNTVYLQMNSLKPEDTAVYYCAARIYHRYWGQGTQVTVSS

SEQ ID NO: 40641 - protein, 122 aa, Artificial Sequence
  Chemically Synthesized
QVQLQESGGGLVQAGGSLRLSCAASGNIFDSAEMGWYRQAPGKERELVAAINVGSITYYADSVKGRFTISRDNAKNTVYLQMNSLKPEDTAVYYCAAYGPYTDDRWSTLDYWGQGTQVTVSS

SEQ ID NO: 40642 - protein, 126 aa, Artificial Sequence
  Chemically Synthesized
QVQLQESGGGLVQAGGSLRLSCAASGYIFYRDRMGWYRQAPGKERELVASIGTGGNTYYADSVKGRFTISRDNAKNTVYLQMNSLKPEDTAVYYCAAKYIILTQLYYGYNRAHQYWGQGTQVTVSS

SEQ ID NO: 40643 - protein, 122 aa, Artificial Sequence
  Chemically Synthesized
QVQLQESGGGLVQAGGSLRLSCAASGNISYGADMGWYRQAPGKEREFVATIAYGTSTNYADSVKGRFTISRDNAKNTVYLQMNSLKPEDTAVYYCAVDTFLSRNDYQDLDYWGQGTQVTVSS

SEQ ID NO: 40644 - protein, 118 aa, Artificial Sequence
  Chemically Synthesized
QVQLQESGGGLVQAGGSLRLSCAASGSIFGAYSMGWYRQAPGKERELVATIAYGGITYYADSVKGRFTISRDNAKNTVYLQMNSLKPEDTAVYYCAVPPVGTLSHFYWGQGTQVTVSS

SEQ ID NO: 40645 - protein, 126 aa, Artificial Sequence
  Chemically Synthesized
QVQLQESGGGLVQAGGSLRLSCAASGTISRYPWMGWYRQAPGKEREFVASITYGSITNYADSVKGRFTISRDNAKNTVYLQMNSLKPEDTAVYYCAALYSAGTQDGTLYVNTLVYWGQGTQVTVSS

SEQ ID NO: 40646 - protein, 126 aa, Artificial Sequence
  Chemically Synthesized
QVQLQESGGGLVQAGGSLRLSCAASGTIFYADVMGWYRQAPGKERELVAGITDGSNTYYADSVKGRFTISRDNAKNTVYLQMNSLKPEDTAVYYCAAIQYQYSYNDYYLYVVHYYWGQGTQVTVSS

SEQ ID NO: 40647 - protein, 126 aa, Artificial Sequence
  Chemically Synthesized
QVQLQESGGGLVQAGGSLRLSCAASGYISDGGYMGWYRQAPGKEREFVAAITGGSNTYYADSVKGRFTISRDNAKNTVYLQMNSLKPEDTAVYYCAVQDVYSDPLYTQADDRHGYWGQGTQVTVSS

SEQ ID NO: 40648 - protein, 113 aa, Artificial Sequence
  Chemically Synthesized
QVQLQESGGGLVQAGGSLRLSCAASGTISGYFDMGWYRQAPGKERELVAAINDGSITNYADSVKGRFTISRDNAKNTVYLQMNSLKPEDTAVYYCAADYYRYWGQGTQVTVSS

SEQ ID NO: 40649 - protein, 123 aa, Artificial Sequence
  Chemically Synthesized
QVQLQESGGGLVQAGGSLRLSCAASGTISGILYMGWYRQAPGKERELVAAITYGATTYYADSVKGRFTISRDNAKNTVYLQMNSLKPEDTAVYYCAAAVQDDSTGTDIRLYYWGQGTQVTVSS

SEQ ID NO: 40650 - protein, 122 aa, Artificial Sequence
  Chemically Synthesized
QVQLQESGGGLVQAGGSLRLSCAASGNIFLAYYMGWYRQAPGKERELVASINYGTTTNYADSVKGRFTISRDNAKNTVYLQMNSLKPEDTAVYYCAAYGPHSDIGVDTYYYWGQGTQVTVSS

SEQ ID NO: 40651 - protein, 118 aa, Artificial Sequence
  Chemically Synthesized
QVQLQESGGGLVQAGGSLRLSCAASGTISIDDHMGWYRQAPGKEREFVASISGGTTTNYADSVKGRFTISRDNAKNTVYLQMNSLKPEDTAVYYCAVIIWRSPYLDYWGQGTQVTVSS

SEQ ID NO: 40652 - protein, 119 aa, Artificial Sequence
  Chemically Synthesized
QVQLQESGGGLVQAGGSLRLSCAASGNIFSPYYMGWYRQAPGKERELVASIDRGGTTYYADSVKGRFTISRDNAKNTVYLQMNSLKPEDTAVYYCAARYYFYDRPYRYWGQGTQVTVSS

SEQ ID NO: 40653 - protein, 126 aa, Artificial Sequence
  Chemically Synthesized
QVQLQESGGGLVQAGGSLRLSCAASGTIFASTFMGWYRQAPGKEREFVATIDDGANTYYADSVKGRFTISRDNAKNTVYLQMNSLKPEDTAVYYCAADFLQLYHDDERYRTAYAYWGQGTQVTVSS

SEQ ID NO: 40654 - protein, 121 aa, Artificial Sequence
  Chemically Synthesized
QVQLQESGGGLVQAGGSLRLSCAASGSISSDRDMGWYRQAPGKERELVAAIASGTNTNYADSVKGRFTISRDNAKNTVYLQMNSLKPEDTAVYYCAVYTEGVAPFFYFGYWGQGTQVTVSS

SEQ ID NO: 40655 - protein, 126 aa, Artificial Sequence
  Chemically Synthesized
QVQLQESGGGLVQAGGSLRLSCAASGSISRNESMGWYRQAPGKEREFVASITYGTSTNYADSVKGRFTISRDNAKNTVYLQMNSLKPEDTAVYYCAVNYAYVEGDDAHYRTFLGYWGQGTQVTVSS

SEQ ID NO: 40656 - protein, 119 aa, Artificial Sequence
  Chemically Synthesized
QVQLQESGGGLVQAGGSLRLSCAASGTISASTDMGWYRQAPGKEREFVATISAGGTTYYADSVKGRFTISRDNAKNTVYLQMNSLKPEDTAVYYCAVPRYAGYRTHAYWGQGTQVTVSS

SEQ ID NO: 40657 - protein, 118 aa, Artificial Sequence
  Chemically Synthesized
QVQLQESGGGLVQAGGSLRLSCAASGSIFPKASMGWYRQAPGKEREFVATITYGSITNYADSVKGRFTISRDNAKNTVYLQMNSLKPEDTAVYYCAANATGFLDHSYWGQGTQVTVSS

SEQ ID NO: 40658 - protein, 122 aa, Artificial Sequence
  Chemically Synthesized
QVQLQESGGGLVQAGGSLRLSCAASGNISDASGMGWYRQAPGKERELVATITPGGITNYADSVKGRFTISRDNAKNTVYLQMNSLKPEDTAVYYCAVVYGFGDYPGGQLYYWGQGTQVTVSS

SEQ ID NO: 40659 - protein, 117 aa, Artificial Sequence
  Chemically Synthesized
QVQLQESGGGLVQAGGSLRLSCAASGNISDLFMGWYRQAPGKERELVATIATGTSTYYADSVKGRFTISRDNAKNTVYLQMNSLKPEDTAVYYCAVQVYLQDLHSYWGQGTQVTVSS

SEQ ID NO: 40660 - protein, 126 aa, Artificial Sequence
  Chemically Synthesized
QVQLQESGGGLVQAGGSLRLSCAASGYIFPIPNMGWYRQAPGKERELVASISYGTSTNYADSVKGRFTISRDNAKNTVYLQMNSLKPEDTAVYYCAVRGWPRRGDWWYGYITHYYWGQGTQVTVSS

SEQ ID NO: 40661 - protein, 118 aa, Artificial Sequence
  Chemically Synthesized
QVQLQESGGGLVQAGGSLRLSCAASGTISYDRNMGWYRQAPGKERELVAGITDGGTTNYADSVKGRFTISRDNAKNTVYLQMNSLKPEDTAVYYCAANHKYRYWLNYWGQGTQVTVSS

SEQ ID NO: 40662 - protein, 122 aa, Artificial Sequence
  Chemically Synthesized
QVQLQESGGGLVQAGGSLRLSCAASGSIFYDDYMGWYRQAPGKERELVATISSGAITNYADSVKGRFTISRDNAKNTVYLQMNSLKPEDTAVYYCAVYSGNDGGLLYVLGYWGQGTQVTVSS

SEQ ID NO: 40663 - protein, 118 aa, Artificial Sequence
  Chemically Synthesized
QVQLQESGGGLVQAGGSLRLSCAASGTIFAVNAMGWYRQAPGKERELVATIGVGASTNYADSVKGRFTISRDNAKNTVYLQMNSLKPEDTAVYYCAARYWYYPRYRYWGQGTQVTVSS

SEQ ID NO: 40664 - protein, 122 aa, Artificial Sequence
  Chemically Synthesized
QVQLQESGGGLVQAGGSLRLSCAASGYISVDDVMGWYRQAPGKEREFVAAITDGTNTYYADSVKGRFTISRDNAKNTVYLQMNSLKPEDTAVYYCAVYAPLGAVDEYGLGYWGQGTQVTVSS

SEQ ID NO: 40665 - protein, 118 aa, Artificial Sequence
  Chemically Synthesized
QVQLQESGGGLVQAGGSLRLSCAASGNISPVWTMGWYRQAPGKEREFVAGIADGGITYYADSVKGRFTISRDNAKNTVYLQMNSLKPEDTAVYYCAVSYAQGGYYQYWGQGTQVTVSS

SEQ ID NO: 40666 - protein, 122 aa, Artificial Sequence
  Chemically Synthesized
QVQLQESGGGLVQAGGSLRLSCAASGSISIYYVMGWYRQAPGKERELVAAITIGTSTNYADSVKGRFTISRDNAKNTVYLQMNSLKPEDTAVYYCAVFDYRLYDGARLYGYWGQGTQVTVSS

SEQ ID NO: 40667 - protein, 118 aa, Artificial Sequence
  Chemically Synthesized
QVQLQESGGGLVQAGGSLRLSCAASGYISTALDMGWYRQAPGKERELVASITYGGITYYADSVKGRFTISRDNAKNTVYLQMNSLKPEDTAVYYCAAYYYDGDWLGYWGQGTQVTVSS

SEQ ID NO: 40668 - protein, 122 aa, Artificial Sequence
  Chemically Synthesized
QVQLQESGGGLVQAGGSLRLSCAASGYISTQYNMGWYRQAPGKEREFVAAIASGANTYYADSVKGRFTISRDNAKNTVYLQMNSLKPEDTAVYYCAAYDDDYYYYYVGHIYWGQGTQVTVSS

SEQ ID NO: 40669 - protein, 122 aa, Artificial Sequence
  Chemically Synthesized
QVQLQESGGGLVQAGGSLRLSCAASGSISRRWQMGWYRQAPGKERELVATITVGANTNYADSVKGRFTISRDNAKNTVYLQMNSLKPEDTAVYYCAAVWEYLSLRFGWFRYWGQGTQVTVSS

SEQ ID NO: 40670 - protein, 122 aa, Artificial Sequence
  Chemically Synthesized
QVQLQESGGGLVQAGGSLRLSCAASGTIFGYRYMGWYRQAPGKERELVAAITNGTSTNYADSVKGRFTISRDNAKNTVYLQMNSLKPEDTAVYYCAANRLHAYDWRATHRYWGQGTQVTVSS

SEQ ID NO: 40671 - protein, 118 aa, Artificial Sequence
  Chemically Synthesized
QVQLQESGGGLVQAGGSLRLSCAASGTISGYLYMGWYRQAPGKERELVASITAGSITYYADSVKGRFTISRDNAKNTVYLQMNSLKPEDTAVYYCAAPYAIPQDHWYWGQGTQVTVSS

SEQ ID NO: 40672 - protein, 122 aa, Artificial Sequence
  Chemically Synthesized
QVQLQESGGGLVQAGGSLRLSCAASGNIFTFNLMGWYRQAPGKERELVAAISVGTTTYYADSVKGRFTISRDNAKNTVYLQMNSLKPEDTAVYYCAVYVFQGVSLDTPYDYWGQGTQVTVSS

SEQ ID NO: 40673 - protein, 118 aa, Artificial Sequence
  Chemically Synthesized
QVQLQESGGGLVQAGGSLRLSCAASGTISFDAEMGWYRQAPGKERELVAGINYGGITNYADSVKGRFTISRDNAKNTVYLQMNSLKPEDTAVYYCAVYYGGSGWLGYWGQGTQVTVSS

SEQ ID NO: 40674 - protein, 126 aa, Artificial Sequence
  Chemically Synthesized
QVQLQESGGGLVQAGGSLRLSCAASGTISGESYMGWYRQAPGKEREFVAAIASGTSTYYADSVKGRFTISRDNAKNTVYLQMNSLKPEDTAVYYCAVILGYDPYSRLRYDSYLFYWGQGTQVTVSS

SEQ ID NO: 40675 - protein, 122 aa, Artificial Sequence
  Chemically Synthesized
QVQLQESGGGLVQAGGSLRLSCAASGNIFWTYRMGWYRQAPGKEREFVAAISYGTSTNYADSVKGRFTISRDNAKNTVYLQMNSLKPEDTAVYYCAVRGFRFLARTAYFDYWGQGTQVTVSS

SEQ ID NO: 40676 - protein, 118 aa, Artificial Sequence
  Chemically Synthesized
QVQLQESGGGLVQAGGSLRLSCAASGNISSGVVMGWYRQAPGKERELVAAISDGSTTYYADSVKGRFTISRDNAKNTVYLQMNSLKPEDTAVYYCAVYDWHYVSYVYWGQGTQVTVSS

SEQ ID NO: 40677 - protein, 122 aa, Artificial Sequence
  Chemically Synthesized
QVQLQESGGGLVQAGGSLRLSCAASGTISGPARMGWYRQAPGKEREFVASISSGAITYYADSVKGRFTISRDNAKNTVYLQMNSLKPEDTAVYYCAAYYYTAGTFDVHFYYWGQGTQVTVSS

SEQ ID NO: 40678 - protein, 122 aa, Artificial Sequence
  Chemically Synthesized
QVQLQESGGGLVQAGGSLRLSCAASGNISDSIYMGWYRQAPGKERELVASINFGTNTYYADSVKGRFTISRDNAKNTVYLQMNSLKPEDTAVYYCAAYTTADSAPYDDFAYWGQGTQVTVSS

SEQ ID NO: 40679 - protein, 122 aa, Artificial Sequence
  Chemically Synthesized
QVQLQESGGGLVQAGGSLRLSCAASGNISRRRAMGWYRQAPGKEREFVAAIGRGATTYYADSVKGRFTISRDNAKNTVYLQMNSLKPEDTAVYYCAVGGHAKSTPWTYHTYWGQGTQVTVSS

SEQ ID NO: 40680 - protein, 118 aa, Artificial Sequence
  Chemically Synthesized
QVQLQESGGGLVQAGGSLRLSCAASGTISYDLIMGWYRQAPGKERELVAGIADGATTYYADSVKGRFTISRDNAKNTVYLQMNSLKPEDTAVYYCAVYIWPDYPYIYWGQGTQVTVSS

SEQ ID NO: 40681 - protein, 126 aa, Artificial Sequence
  Chemically Synthesized
QVQLQESGGGLVQAGGSLRLSCAASGSISYLADMGWYRQAPGKEREFVAGIDYGGNTYYADSVKGRFTISRDNAKNTVYLQMNSLKPEDTAVYYCAAYVPTLYVDDDRDYVVYYYWGQGTQVTVSS

SEQ ID NO: 40682 - protein, 118 aa, Artificial Sequence
  Chemically Synthesized
QVQLQESGGGLVQAGGSLRLSCAASGYIFRFDSMGWYRQAPGKERELVATITRGGSTNYADSVKGRFTISRDNAKNTVYLQMNSLKPEDTAVYYCAVGYYYLLDHRYWGQGTQVTVSS

SEQ ID NO: 40683 - protein, 118 aa, Artificial Sequence
  Chemically Synthesized
QVQLQESGGGLVQAGGSLRLSCAASGSISYAYDMGWYRQAPGKEREFVAAIAEGATTYYADSVKGRFTISRDNAKNTVYLQMNSLKPEDTAVYYCAAQTAYIKDHRYWGQGTQVTVSS

SEQ ID NO: 40684 - protein, 118 aa, Artificial Sequence
  Chemically Synthesized
QVQLQESGGGLVQAGGSLRLSCAASGNIFSRYYMGWYRQAPGKEREFVAAISYGAITYYADSVKGRFTISRDNAKNTVYLQMNSLKPEDTAVYYCAVGYRKYGYFRYWGQGTQVTVSS

SEQ ID NO: 40685 - protein, 118 aa, Artificial Sequence
  Chemically Synthesized
QVQLQESGGGLVQAGGSLRLSCAASGTISASTYMGWYRQAPGKEREFVAAITYGSSTYYADSVKGRFTISRDNAKNTVYLQMNSLKPEDTAVYYCAVLDRGENQLWYWGQGTQVTVSS

SEQ ID NO: 40686 - protein, 118 aa, Artificial Sequence
  Chemically Synthesized
QVQLQESGGGLVQAGGSLRLSCAASGNISGPSAMGWYRQAPGKERELVAGITRGGTTYYADSVKGRFTISRDNAKNTVYLQMNSLKPEDTAVYYCAVDYATRTGLGYWGQGTQVTVSS

SEQ ID NO: 40687 - protein, 118 aa, Artificial Sequence
  Chemically Synthesized
QVQLQESGGGLVQAGGSLRLSCAASGSISRAHAMGWYRQAPGKEREFVASIGGGSSTYYADSVKGRFTISRDNAKNTVYLQMNSLKPEDTAVYYCAADGTGFIDFAYWGQGTQVTVSS

SEQ ID NO: 40688 - protein, 118 aa, Artificial Sequence
  Chemically Synthesized
QVQLQESGGGLVQAGGSLRLSCAASGSIFDDPYMGWYRQAPGKEREFVASIGLGGITNYADSVKGRFTISRDNAKNTVYLQMNSLKPEDTAVYYCAAPLLYTVWFWYWGQGTQVTVSS

SEQ ID NO: 40689 - protein, 118 aa, Artificial Sequence
  Chemically Synthesized
QVQLQESGGGLVQAGGSLRLSCAASGYIFNGRPMGWYRQAPGKERELVAGINRGATTYYADSVKGRFTISRDNAKNTVYLQMNSLKPEDTAVYYCAARSWYYYRHTYWGQGTQVTVSS

SEQ ID NO: 40690 - protein, 116 aa, Artificial Sequence
  Chemically Synthesized
QVQLQESGGGLVQAGGSLRLSCAASGYIFYSVMGWYRQAPGKEREFVAAIGRGGSTYYADSVKGRFTISRDNAKNTVYLQMNSLKPEDTAVYYCAVALDDSWFIYWGQGTQVTVSS

SEQ ID NO: 40691 - protein, 118 aa, Artificial Sequence
  Chemically Synthesized
QVQLQESGGGLVQAGGSLRLSCAASGNIFGNPSMGWYRQAPGKERELVAAIDKGTNTYYADSVKGRFTISRDNAKNTVYLQMNSLKPEDTAVYYCAAYRGLYRRHWYWGQGTQVTVSS

SEQ ID NO: 40692 - protein, 116 aa, Artificial Sequence
  Chemically Synthesized
QVQLQESGGGLVQAGGSLRLSCAASGYISEIAYMGWYRQAPGKERELVAGIPYADSVKGRFTISRDNAKNTVYLQMNSLKPEDTAVYYCAARTDDAGPYYDYLSYWGQGTQVTVSS

SEQ ID NO: 40693 - protein, 121 aa, Artificial Sequence
  Chemically Synthesized
QVQLQESGGGLVQAGGSLRLSCAASGNIFRRQLMGWYRQAPGKERELVAAIAVGGTTNYADSVKGRFTISRDNAKNTVYLQMNSLKPEDTAVYYCAAGGVHPNYAFDYHYWGQGTQVTVSS

SEQ ID NO: 40694 - protein, 121 aa, Artificial Sequence
  Chemically Synthesized
QVQLQESGGGLVQAGGSLRLSCAASGNISVGQVMGWYRQAPGKEREFVAGIDNGTTTYYADSVKGRFTISRDNAKNTVYLQMNSLKPEDTAVYYCAAYYYDDWWIVPHDYWGQGTQVTVSS

SEQ ID NO: 40695 - protein, 118 aa, Artificial Sequence
  Chemically Synthesized
QVQLQESGGGLVQAGGSLRLSCAASGYISAPYTMGWYRQAPGKEREFVAAIGVGANTYYADSVKGRFTISRDNAKNTVYLQMNSLKPEDTAVYYCAVGWRRYRYHYYWGQGTQVTVSS

SEQ ID NO: 40696 - protein, 118 aa, Artificial Sequence
  Chemically Synthesized
QVQLQESGGGLVQAGGSLRLSCAASGTIFETVTMGWYRQAPGKEREFVAGIGYGGSTNYADSVKGRFTISRDNAKNTVYLQMNSLKPEDTAVYYCAVTYGPSFILGYWGQGTQVTVSS

SEQ ID NO: 40697 - protein, 122 aa, Artificial Sequence
  Chemically Synthesized
QVQLQESGGGLVQAGGSLRLSCAASGNIFGSYAMGWYRQAPGKEREFVAGIGYGGTTNYADSVKGRFTISRDNAKNTVYLQMNSLKPEDTAVYYCAAWYYERVVKDYVLGYWGQGTQVTVSS

SEQ ID NO: 40698 - protein, 118 aa, Artificial Sequence
  Chemically Synthesized
QVQLQESGGGLVQAGGSLRLSCAASGTIFRWYQMGWYRQAPGKERELVAGIARGSSTYYADSVKGRFTISRDNAKNTVYLQMNSLKPEDTAVYYCAARPWGYLRHYYWGQGTQVTVSS

SEQ ID NO: 40699 - protein, 122 aa, Artificial Sequence
  Chemically Synthesized
QVQLQESGGGLVQAGGSLRLSCAASGNIFGRSRMGWYRQAPGKEREFVASIDPGSSTNYADSVKGRFTISRDNAKNTVYLQMNSLKPEDTAVYYCAVLRRWKFLVYDGHSYWGQGTQVTVSS

SEQ ID NO: 40700 - protein, 124 aa, Artificial Sequence
  Chemically Synthesized
QVQLQESGGGLVQAGGSLRLSCAASGSKPDYMGWYRQAPGKEREFVAGIAYGATTYYADSVKGRFTISRDNAKNTVYLQMNSLKPEDTAVYYCAVIFPSYTALDSPHYTRLSYWGQGTQVTVSS

SEQ ID NO: 40701 - protein, 125 aa, Artificial Sequence
  Chemically Synthesized
QVQLQESGGGLVQAGGSLRLSCAASGYIFSREMGWYRQAPGKEREFVATIAYGTSTNYADSVKGRFTISRDNAKNTVYLQMNSLKPEDTAVYYCAVNISQGDRGGYPTASGHPYWGQGTQVTVSS

SEQ ID NO: 40702 - protein, 118 aa, Artificial Sequence
  Chemically Synthesized
QVQLQESGGGLVQAGGSLRLSCAASGYIFIADDMGWYRQAPGKEREFVAGITKGGSTYYADSVKGRFTISRDNAKNTVYLQMNSLKPEDTAVYYCAVQDVDHEDHRYWGQGTQVTVSS

SEQ ID NO: 40703 - protein, 122 aa, Artificial Sequence
  Chemically Synthesized
QVQLQESGGGLVQAGGSLRLSCAASGSISAGRLMGWYRQAPGKERELVAGIAGGGTTNYADSVKGRFTISRDNAKNTVYLQMNSLKPEDTAVYYCAVWFYYYTDYRGGLYYWGQGTQVTVSS

SEQ ID NO: 40704 - protein, 122 aa, Artificial Sequence
  Chemically Synthesized
QVQLQESGGGLVQAGGSLRLSCAASGNIFNYRRMGWYRQAPGKERELVASIGHGTNTYYADSVKGRFTISRDNAKNTVYLQMNSLKPEDTAVYYCAAGRQRDYKYYPLHYYWGQGTQVTVSS

SEQ ID NO: 40705 - protein, 125 aa, Artificial Sequence
  Chemically Synthesized
QVQLQESGGGLVQAGGSLRLSCAASGTISWAWSMGWYRQAPGKERELVATITNGTSTNYADSVKGRFTISRDNAKNTVYLQMNSLKPEDTAVYYCAVGPLRLSNGGKRVSDHYYWGQGTQVTVSS

SEQ ID NO: 40706 - protein, 126 aa, Artificial Sequence
  Chemically Synthesized
QVQLQESGGGLVQAGGSLRLSCAASGNISLPSDMGWYRQAPGKERELVATIDTGSTTYYADSVKGRFTISRDNAKNTVYLQMNSLKPEDTAVYYCAANYYYLYSYDGDFFTQYAYWGQGTQVTVSS

SEQ ID NO: 40707 - protein, 122 aa, Artificial Sequence
  Chemically Synthesized
QVQLQESGGGLVQAGGSLRLSCAASGSISVAYNMGWYRQAPGKEREFVASIGGGTITYYADSVKGRFTISRDNAKNTVYLQMNSLKPEDTAVYYCAVGGYESTTYTWLLAYWGQGTQVTVSS

SEQ ID NO: 40708 - protein, 118 aa, Artificial Sequence
  Chemically Synthesized
QVQLQESGGGLVQAGGSLRLSCAASGYIFTPYIMGWYRQAPGKEREFVAGITLGANTYYADSVKGRFTISRDNAKNTVYLQMNSLKPEDTAVYYCAVYRRLYVTHWYWGQGTQVTVSS

SEQ ID NO: 40709 - protein, 115 aa, Artificial Sequence
  Chemically Synthesized
QVQLQESGGGLVQAGGSLRLSCAASGYISRTTVMGWYRQAPGKERELVATISQGGTTYYADSVKGRFTISRDNAKNTVYLQMNSLKPEDTAVYYCAAAPGYYPYWGQGTQVTVSS

SEQ ID NO: 40710 - protein, 122 aa, Artificial Sequence
  Chemically Synthesized
QVQLQESGGGLVQAGGSLRLSCAASGYIFSRRYMGWYRQAPGKERELVAAIDRGTSTYYADSVKGRFTISRDNAKNTVYLQMNSLKPEDTAVYYCAARRTYQPFYGSPHAYWGQGTQVTVSS

SEQ ID NO: 40711 - protein, 119 aa, Artificial Sequence
  Chemically Synthesized
QVQLQESGGGLVQAGGSLRLSCAASGNISGPRTMGWYRQAPGKEREFVAGITYGAITYYADSVKGRFTISRDNAKNTVYLQMNSLKPEDTAVYYCAVDYYYVRWRHPYWGQGTQVTVSS

SEQ ID NO: 40712 - protein, 126 aa, Artificial Sequence
  Chemically Synthesized
QVQLQESGGGLVQAGGSLRLSCAASGTISSLYYMGWYRQAPGKEREFVASIAYGGSTNYADSVKGRFTISRDNAKNTVYLQMNSLKPEDTAVYYCAVNERIQYKYGYDFYLGHVYWGQGTQVTVSS

SEQ ID NO: 40713 - protein, 117 aa, Artificial Sequence
  Chemically Synthesized
QVQLQESGGGLVQAGGSLRLSCAASGNISGEYMGWYRQAPGKERELVAAIGSGSSTYYADSVKGRFTISRDNAKNTVYLQMNSLKPEDTAVYYCAVLYSDADLYAYWGQGTQVTVSS

SEQ ID NO: 40714 - protein, 118 aa, Artificial Sequence
  Chemically Synthesized
QVQLQESGGGLVQAGGSLRLSCAASGYISGSQYMGWYRQAPGKERELVAAITYGGSTYYADSVKGRFTISRDNAKNTVYLQMNSLKPEDTAVYYCAVRSRRWERYGYWGQGTQVTVSS

SEQ ID NO: 40715 - protein, 126 aa, Artificial Sequence
  Chemically Synthesized
QVQLQESGGGLVQAGGSLRLSCAASGTISLPWYMGWYRQAPGKERELVAGIAHGATTNYADSVKGRFTISRDNAKNTVYLQMNSLKPEDTAVYYCAALQSHDSSLYIGPGYVHYYWGQGTQVTVSS

SEQ ID NO: 40716 - protein, 121 aa, Artificial Sequence
  Chemically Synthesized
QVQLQESGGGLVQAGGSLRLSCAASGSIFSLIMGWYRQAPGKERELVAGINYGSTTYYADSVKGRFTISRDNAKNTVYLQMNSLKPEDTAVYYCAADYNGQNRFYPDHLYWGQGTQVTVSS

SEQ ID NO: 40717 - protein, 122 aa, Artificial Sequence
  Chemically Synthesized
QVQLQESGGGLVQAGGSLRLSCAASGYIFYRGEMGWYRQAPGKERELVAAITRGATTNYADSVKGRFTISRDNAKNTVYLQMNSLKPEDTAVYYCAAWNRWTVARRWPLYYWGQGTQVTVSS

SEQ ID NO: 40718 - protein, 126 aa, Artificial Sequence
  Chemically Synthesized
QVQLQESGGGLVQAGGSLRLSCAASGSISYPYTMGWYRQAPGKEREFVASIANGANTYYADSVKGRFTISRDNAKNTVYLQMNSLKPEDTAVYYCAVYYDADELGFVGPLQWLGYWGQGTQVTVSS

SEQ ID NO: 40719 - protein, 117 aa, Artificial Sequence
  Chemically Synthesized
QVQLQESGGGLVQAGGSLRLSCAASGNIFKPRVMGWYRQAPGKERELVAGISFGANTYYADSVKGRFTISRDNAKNTVYLQMNSLKPEDTAVYYCAVVTSYRVHGYWGQGTQVTVSS

SEQ ID NO: 40720 - protein, 118 aa, Artificial Sequence
  Chemically Synthesized
QVQLQESGGGLVQAGGSLRLSCAASGYISPGRSMGWYRQAPGKEREFVASIARGSTTNYADSVKGRFTISRDNAKNTVYLQMNSLKPEDTAVYYCAVGRDIWYWHVYWGQGTQVTVSS

SEQ ID NO: 40721 - protein, 120 aa, Artificial Sequence
  Chemically Synthesized
QVQLQESGGGLVQAGGSLRLSCAASGNISFSYMGWYRQAPGKERELVASIGWGSSTNYADSVKGRFTISRDNAKNTVYLQMNSLKPEDTAVYYCAVWSSGQQLSDWLGYWGQGTQVTVSS

SEQ ID NO: 40722 - protein, 118 aa, Artificial Sequence
  Chemically Synthesized
QVQLQESGGGLVQAGGSLRLSCAASGSISADSTMGWYRQAPGKEREFVAGIGTGGTTNYADSVKGRFTISRDNAKNTVYLQMNSLKPEDTAVYYCAVFLNDDGPFEYWGQGTQVTVSS

SEQ ID NO: 40723 - protein, 126 aa, Artificial Sequence
  Chemically Synthesized
QVQLQESGGGLVQAGGSLRLSCAASGYISRVSTMGWYRQAPGKERELVAAISVGANTYYADSVKGRFTISRDNAKNTVYLQMNSLKPEDTAVYYCAADVSYRTWDQRRYTYRHRYWGQGTQVTVSS

SEQ ID NO: 40724 - protein, 117 aa, Artificial Sequence
  Chemically Synthesized
QVQLQESGGGLVQAGGSLRLSCAASGTIFRRDDMGWYRQAPGKEREFAGIDSGGSTNYADSVKGRFTISRDNAKNTVYLQMNSLKPEDTAVYYCAVGGYSYGYFDYWGQGTQVTVSS

SEQ ID NO: 40725 - protein, 118 aa, Artificial Sequence
  Chemically Synthesized
QVQLQESGGGLVQAGGSLRLSCAASGNISGDAYMGWYRQAPGKEREFVATIDVGGTTNYADSVKGRFTISRDNAKNTVYLQMNSLKPEDTAVYYCAVTYSYVYWLGYWGQGTQVTVSS

SEQ ID NO: 40726 - protein, 118 aa, Artificial Sequence
  Chemically Synthesized
QVQLQESGGGLVQAGGSLRLSCAASGNIFTYNVMGWYRQAPGKEREFVASITSGGNTNYADSVKGRFTISRDNAKNTVYLQMNSLKPEDTAVYYCAVGYYLRYIHVYWGQGTQVTVSS

SEQ ID NO: 40727 - protein, 122 aa, Artificial Sequence
  Chemically Synthesized
QVQLQESGGGLVQAGGSLRLSCAASGTIFTDAYMGWYRQAPGKERELVASINSGASTNYADSVKGRFTISRDNAKNTVYLQMNSLKPEDTAVYYCAVYYWNRGPNYDWLGYWGQGTQVTVSS

SEQ ID NO: 40728 - protein, 118 aa, Artificial Sequence
  Chemically Synthesized
QVQLQESGGGLVQAGGSLRLSCAASGTIFLYRGMGWYRQAPGKEREFVAGISGGGITNYADSVKGRFTISRDNAKNTVYLQMNSLKPEDTAVYYCAAQPYYPPWFSYWGQGTQVTVSS

SEQ ID NO: 40729 - protein, 122 aa, Artificial Sequence
  Chemically Synthesized
QVQLQESGGGLVQAGGSLRLSCAASGYISNYLQMGWYRQAPGKERELVASINHGSSTYYADSVKGRFTISRDNAKNTVYLQMNSLKPEDTAVYYCAAGRYYSYARWRYLRYWGQGTQVTVSS

SEQ ID NO: 40730 - protein, 118 aa, Artificial Sequence
  Chemically Synthesized
QVQLQESGGGLVQAGGSLRLSCAASGYISRRWYVMGWYRQAPGKERELVAAISQGSNTYYADSVKGRFTISRDNAKNTVYLQMNSLKPEDTAVYYCAAEGRAWRYDYWGQGTQVTVSS

SEQ ID NO: 40731 - protein, 122 aa, Artificial Sequence
  Chemically Synthesized
QVQLQESGGGLVQAGGSLRLSCAASGSISPPYVMGWYRQAPGKERELVAAIAIGGTTNYADSVKGRFTISRDNAKNTVYLQMNSLKPEDTAVYYCAARGYFYPYLNSAYNYWGQGTQVTVSS

SEQ ID NO: 40732 - protein, 118 aa, Artificial Sequence
  Chemically Synthesized
QVQLQESGGGLVQAGGSLRLSCAASGNIFTVLQMGWYRQAPGKEREFVAAINSGTNTNYADSVKGRFTISRDNAKNTVYLQMNSLKPEDTAVYYCAVNRRRYRYLYYWGQGTQVTVSS

SEQ ID NO: 40733 - protein, 118 aa, Artificial Sequence
  Chemically Synthesized
QVQLQESGGGLVQAGGSLRLSCAASGYIFRDINMGWYRQAPGKEREFVAGIGEGSSTNYADSVKGRFTISRDNAKNTVYLQMNSLKPEDTAVYYCAVPVANLDTHIYWGQGTQVTVSS

SEQ ID NO: 40734 - protein, 126 aa, Artificial Sequence
  Chemically Synthesized
QVQLQESGGGLVQAGGSLRLSCAASGNIFPGGAMGWYRQAPGKEREFVAGIGNGGSTYYADSVKGRFTISRDNAKNTVYLQMNSLKPEDTAVYYCAVLFYQRAGRYGTRWAPYTYWGQGTQVTVSS

SEQ ID NO: 40735 - protein, 122 aa, Artificial Sequence
  Chemically Synthesized
QVQLQESGGGLVQAGGSLRLSCAASGSIFGNRRMGWYRQAPGKERELVAGIGPGTTTNYADSVKGRFTISRDNAKNTVYLQMNSLKPEDTAVYYCAARGAVRPYPGRGHYYWGQGTQVTVSS

SEQ ID NO: 40736 - protein, 125 aa, Artificial Sequence
  Chemically Synthesized
QVQLQESGGGLVQAGGSLRLSCAASGNISRHYLMGWYRQAPGKERELVAAITTGGNTNYADSVKGRFTISRDNAKNTVYLQMNSLKPEDTAVYYCAALDDRPDTLSVLTTTVFYWGQGTQVTVSS

SEQ ID NO: 40737 - protein, 126 aa, Artificial Sequence
  Chemically Synthesized
QVQLQESGGGLVQAGGSLRLSCAASGYISIDLYMGWYRQAPGKEREFVASIDYGSNTYYADSVKGRFTISRDNAKNTVYLQMNSLKPEDTAVYYCAVYWDGHGDPVYGLDTWLGYWGQGTQVTVSS

SEQ ID NO: 40738 - protein, 122 aa, Artificial Sequence
  Chemically Synthesized
QVQLQESGGGLVQAGGSLRLSCAASGNISRHGRMGWYRQAPGKEREFVASIGPGGITYYADSVKGRFTISRDNAKNTVYLQMNSLKPEDTAVYYCAARHLWGHWTYDAYGYWGQGTQVTVSS

SEQ ID NO: 40739 - protein, 118 aa, Artificial Sequence
  Chemically Synthesized
QVQLQESGGGLVQAGGSLRLSCAASGTISDDVNMGWYRQAPGKERELVATIDFGGSTNYADSVKGRFTISRDNAKNTVYLQMNSLKPEDTAVYYCAVGVWYDWYHAYWGQGTQVTVSS

SEQ ID NO: 40740 - protein, 122 aa, Artificial Sequence
  Chemically Synthesized
QVQLQESGGGLVQAGGSLRLSCAASGTISDWYRMGWYRQAPGKEREFVASITKGSITYYADSVKGRFTISRDNAKNTVYLQMNSLKPEDTAVYYCAVRGGWWSTYRYRHVYWGQGTQVTVSS

SEQ ID NO: 40741 - protein, 118 aa, Artificial Sequence
  Chemically Synthesized
QVQLQESGGGLVQAGGSLRLSCAASGYISRYVYMGWYRQAPGKEREFVAGINPGGNTYYADSVKGRFTISRDNAKNTVYLQMNSLKPEDTAVYYCAVASYRHRYHPYWGQGTQVTVSS

SEQ ID NO: 40742 - protein, 118 aa, Artificial Sequence
  Chemically Synthesized
QVQLQESGGGLVQAGGSLRLSCAASGTISETPPMGWYRQAPGKEREFVAAIGDGTSTYYADSVKGRFTISRDNAKNTVYLQMNSLKPEDTAVYYCAVLYTSSWAHPYWGQGTQVTVSS

SEQ ID NO: 40743 - protein, 126 aa, Artificial Sequence
  Chemically Synthesized
QVQLQESGGGLVQAGGSLRLSCAASGSISSTYNMGWYRQAPGKERELVAAIASGANTYYADSVKGRFTISRDNAKNTVYLQMNSLKPEDTAVYYCAVRRRRGGAWNLYHRGRYPYWGQGTQVTVSS

SEQ ID NO: 40744 - protein, 118 aa, Artificial Sequence
  Chemically Synthesized
QVQLQESGGGLVQAGGSLRLSCAASGTIFWHETMGWYRQAPGKEREFVASISDGTTTNYADSVKGRFTISRDNAKNTVYLQMNSLKPEDTAVYYCAASAFRRDFYTYWGQGTQVTVSS

SEQ ID NO: 40745 - protein, 118 aa, Artificial Sequence
  Chemically Synthesized
QVQLQESGGGLVQAGGSLRLSCAASGNIFYLPYMGWYRQAPGKERELVAAIDYGSITNYADSVKGRFTISRDNAKNTVYLQMNSLKPEDTAVYYCAVVYGRRRYHLYWGQGTQVTVSS

SEQ ID NO: 40746 - protein, 117 aa, Artificial Sequence
  Chemically Synthesized
QVQLQESGGGLVQAGGSLRLSCAASGSIFGYSRMGWYRQAPGKEREFVAGIDDGAITYYADSVKGRFTISRDNAKNTVYLQMNSLKPEDTAVYYCAVLTVCTTTMYWGQGTQVTVSS

SEQ ID NO: 40747 - protein, 125 aa, Artificial Sequence
  Chemically Synthesized
QVQLQESGGGLVQAGGSLRLSCAASGTISNLFYMGWYRQAPGKEREFVASIGGGNTNYADSVKGRFTISRDNAKNTVYLQMNSLKPEDTAVYYCAASPRGAYYRYLYYYYAHYYWGQGTQVTVSS

SEQ ID NO: 40748 - protein, 118 aa, Artificial Sequence
  Chemically Synthesized
QVQLQESGGGLVQAGGSLRLSCAASGTISRWRGMGWYRQAPGKEREFVATISYGTSTNYADSVKGRFTISRDNAKNTVYLQMNSLKPEDTAVYYCAVYRRGPYNFNYWGQGTQVTVSS

SEQ ID NO: 40749 - protein, 118 aa, Artificial Sequence
  Chemically Synthesized
QVQLQESGGGLVQAGGSLRLSCAASGNISAIYRMGWYRQAPGKEREFVAGINWGTNTYYADSVKGRFTISRDNAKNTVYLQMNSLKPEDTAVYYCAVKYIYYTVHNYWGQGTQVTVSS

SEQ ID NO: 40750 - protein, 122 aa, Artificial Sequence
  Chemically Synthesized
QVQLQESGGGLVQAGGSLRLSCAASGSIFVPYYMGWYRQAPGKERELVASIADGTNTNYADSVKGRFTISRDNAKNTVYLQMNSLKPEDTAVYYCAAWTVDWEYTADPYYYWGQGTQVTVSS

SEQ ID NO: 40751 - protein, 122 aa, Artificial Sequence
  Chemically Synthesized
QVQLQESGGGLVQAGGSLRLSCAASGYISYPSNMGWYRQAPGKERELVASINVGSITNYADSVKGRFTISRDNAKNTVYLQMNSLKPEDTAVYYCAVGDVDSEIHGRSYAYWGQGTQVTVSS

SEQ ID NO: 40752 - protein, 126 aa, Artificial Sequence
  Chemically Synthesized
QVQLQESGGGLVQAGGSLRLSCAASGTIFYAEWMGWYRQAPGKEREFVAGIGGGSNTNYADSVKGRFTISRDNAKNTVYLQMNSLKPEDTAVYYCAVPDGRSVWFWAPSRRYHYYWGQGTQVTVSS

SEQ ID NO: 40753 - protein, 118 aa, Artificial Sequence
  Chemically Synthesized
QVQLQESGGGLVQAGGSLRLSCAASGTISPVTIMGWYRQAPGKERELVATIATGGITYYADSVKGRFTISRDNAKNTVYLQMNSLKPEDTAVYYCAARTRYRYRHGYWGQGTQVTVSS

SEQ ID NO: 40754 - protein, 118 aa, Artificial Sequence
  Chemically Synthesized
QVQLQESGGGLVQAGGSLRLSCAASGSIFRPVYMGWYRQAPGKERELVAGIAWGTSTYYADSVKGRFTISRDNAKNTVYLQMNSLKPEDTAVYYCAARSWFTVSHSYWGQGTQVTVSS

SEQ ID NO: 40755 - protein, 118 aa, Artificial Sequence
  Chemically Synthesized
QVQLQESGGGLVQAGGSLRLSCAASGSISTQTSMGWYRQAPGKEREFVAGIAYGGITYYADSVKGRFTISRDNAKNTVYLQMNSLKPEDTAVYYCAVDYFDGTNLYYWGQGTQVTVSS

SEQ ID NO: 40756 - protein, 118 aa, Artificial Sequence
  Chemically Synthesized
QVQLQESGGGLVQAGGSLRLSCAASGTIFAYRYMGWYRQAPGKERELVAGIAFGTTTNYADSVKGRFTISRDNAKNTVYLQMNSLKPEDTAVYYCAVVNLNYLLFDYWGQGTQVTVSS

SEQ ID NO: 40757 - protein, 122 aa, Artificial Sequence
  Chemically Synthesized
QVQLQESGGGLVQAGGSLRLSCAASGNIFSAYYMGWYRQAPGKEREFVASIGYGATTYYADSVKGRFTISRDNAKNTVYLQMNSLKPEDTAVYYCAAYYNETYVTYGWYVYWGQGTQVTVSS

SEQ ID NO: 40758 - protein, 122 aa, Artificial Sequence
  Chemically Synthesized
QVQLQESGGGLVQAGGSLRLSCAASGYIFRYGDMGWYRQAPGKERELVAGITPGTITYYADSVKGRFTISRDNAKNTVYLQMNSLKPEDTAVYYCAVRPRGYREQKYGHGYWGQGTQVTVSS

SEQ ID NO: 40759 - protein, 126 aa, Artificial Sequence
  Chemically Synthesized
QVQLQESGGGLVQAGGSLRLSCAASGNIFWLRYMGWYRQAPGKEREFVAGITHGANTYYADSVKGRFTISRDNAKNTVYLQMNSLKPEDTAVYYCAVLGDGWSSGNAGLTPKLVYWGQGTQVTVSS

SEQ ID NO: 40760 - protein, 119 aa, Artificial Sequence
  Chemically Synthesized
QVQLQESGGGLVQAGGSLRLSCAASGNIFTLLLRMGWYRQAPGKERELVAGIADGGSTNYADSVKGRFTISRDNAKNTVYLQMNSLKPEDTAVYYCAAGTSVRPRLYYWGQGTQVTVSS

SEQ ID NO: 40761 - protein, 126 aa, Artificial Sequence
  Chemically Synthesized
QVQLQESGGGLVQAGGSLRLSCAASGYIFRYIGMGWYRQAPGKERELVAAITRGSNTYYADSVKGRFTISRDNAKNTVYLQMNSLKPEDTAVYYCAAISTGSTTWRYLSRLQYAYWGQGTQVTVSS

SEQ ID NO: 40762 - protein, 120 aa, Artificial Sequence
  Chemically Synthesized
QVQLQESGGGLVQAGGSLRLSCAASGNISYKLRMGWYRQAPGKERELVATIGTGANTYYADSVKGRFTISRDNAKNTVYLQMNSLKPEDTAVYYCAAGGRQYGYYNLSYWGQGTQVTVSS

SEQ ID NO: 40763 - protein, 126 aa, Artificial Sequence
  Chemically Synthesized
QVQLQESGGGLVQAGGSLRLSCAASGTIFTSYYMGWYRQAPGKERELVASITNGGSTYYADSVKGRFTISRDNAKNTVYLQMNSLKPEDTAVYYCAVQPWDTNKWSRVYTRRYNYWGQGTQVTVSS

SEQ ID NO: 40764 - protein, 122 aa, Artificial Sequence
  Chemically Synthesized
QVQLQESGGGLVQAGGSLRLSCAASGYIFYYIYMGWYRQAPGKERELVASIGSGTSTYYADSVKGRFTISRDNAKNTVYLQMNSLKPEDTAVYYCAADSPEYDYDDTGYAYWGQGTQVTVSS

SEQ ID NO: 40765 - protein, 115 aa, Artificial Sequence
  Chemically Synthesized
QVQLQESGGGLVQAGGSLRLSCAASGNIFESYTMGWYRQAPGKERELVATIGGGTNTYYADSVKGRFTISRDNAKNTVYLQMNSLKPEDTAVYYCAYPYTVHTYWGQGTQVTVSS

SEQ ID NO: 40766 - protein, 125 aa, Artificial Sequence
  Chemically Synthesized
QVQLQESGGGLVQAGGSLRLSCAASGSISIVVDMGWYRQAPGKERELVAGINYGTSTYYADSVKGRFTISRDNAKNTVYLQMNSLKPEDTAVYYCAADWSVTVLTVLTNTTVLYWGQGTQVTVSS

SEQ ID NO: 40767 - protein, 118 aa, Artificial Sequence
  Chemically Synthesized
QVQLQESGGGLVQAGGSLRLSCAASGYIFASDYMGWYRQAPGKERELVAAIDYGGTTYYADSVKGRFTISRDNAKNTVYLQMNSLKPEDTAVYYCAVAWSDDAWFDYWGQGTQVTVSS

SEQ ID NO: 40768 - protein, 118 aa, Artificial Sequence
  Chemically Synthesized
QVQLQESGGGLVQAGGSLRLSCAASGSISYPYVMGWYRQAPGKERELVATIGSGANTYYADSVKGRFTISRDNAKNTVYLQMNSLKPEDTAVYYCAVYHLSYDDFQYWGQGTQVTVSS

SEQ ID NO: 40769 - protein, 118 aa, Artificial Sequence
  Chemically Synthesized
QVQLQESGGGLVQAGGSLRLSCAASGSISRHISMGWYRQAPGKEREFVAAINYGTSTYYADSVKGRFTISRDNAKNTVYLQMNSLKPEDTAVYYCAVGYASLYRHFYWGQGTQVTVSS

SEQ ID NO: 40770 - protein, 118 aa, Artificial Sequence
  Chemically Synthesized
QVQLQESGGGLVQAGGSLRLSCAASGNIFSYTGMGWYRQAPGKEREFVAAITTGGNTNYADSVKGRFTISRDNAKNTVYLQMNSLKPEDTAVYYCAVAGDQDDLYAYWGQGTQVTVSS

SEQ ID NO: 40771 - protein, 117 aa, Artificial Sequence
  Chemically Synthesized
QVQLQESGGGLVQAGGSLRLSCAASGNIFLRDFMGWYRQAPGKERELVAAIGPVLLPYADSVKGRFTISRDNAKNTVYLQMNSLKPEDTAVYYCAVYWTDRQLHDYWGQGTQVTVSS

SEQ ID NO: 40772 - protein, 118 aa, Artificial Sequence
  Chemically Synthesized
QVQLQESGGGLVQAGGSLRLSCAASGTISDTWYMGWYRQAPGKERELVASIDQGGITYYADSVKGRFTISRDNAKNTVYLQMNSLKPEDTAVYYCAVLLAWYEGHDYWGQGTQVTVSS

SEQ ID NO: 40773 - protein, 126 aa, Artificial Sequence
  Chemically Synthesized
QVQLQESGGGLVQAGGSLRLSCAASGSIFRSSRMGWYRQAPGKERELVASIASGSTTYYADSVKGRFTISRDNAKNTVYLQMNSLKPEDTAVYYCAASTYGLYYWPGRYDRRFRYWGQGTQVTVSS

SEQ ID NO: 40774 - protein, 118 aa, Artificial Sequence
  Chemically Synthesized
QVQLQESGGGLVQAGGSLRLSCAASGTIFPYYVMGWYRQAPGKERELVAGIAGGTSTNYADSVKGRFTISRDNAKNTVYLQMNSLKPEDTAVYYCAAGRRLRHYHYYWGQGTQVTVSS

SEQ ID NO: 40775 - protein, 125 aa, Artificial Sequence
  Chemically Synthesized
QVQLQESGGGLVQAGGSLRLSCAASGSISDSPLMGWYRQAPGKEREFVATIGWGGTTNYADSVKGRFTISRDNAKNTVYLQMNSLKPEDTAVYYCAVRYASTDDNDTSRVTVIYWGQGTQVTVSS

SEQ ID NO: 40776 - protein, 121 aa, Artificial Sequence
  Chemically Synthesized
QVQLQESGGGLVQAGGSLRLSCAASGTIFTVYMGWYRQAPGKERELVATITYGGITNYADSVKGRFTISRDNAKNTVYLQMNSLKPEDTAVYYCAVWYFYLSWLDWGFLYWGQGTQVTVSS

SEQ ID NO: 40777 - protein, 122 aa, Artificial Sequence
  Chemically Synthesized
QVQLQESGGGLVQAGGSLRLSCAASGYISTPVIMGWYRQAPGKERELVAAISLGANTYYADSVKGRFTISRDNAKNTVYLQMNSLKPEDTAVYYCAARIKYGWYYVAYHYYWGQGTQVTVSS

SEQ ID NO: 40778 - protein, 130 aa, Artificial Sequence
  Chemically Synthesized
QVQLQESGGGLVQAGGSLRLSCAASGNISDNYYMGWYRQAPGKERELVASIAPGGTTYYADSVKGRFTISRDNAKNTVYLQMNSLKPEDTAVYYCAAFIAGRVRPGIGLYNDGTIGHQYWGQGTQVTVSS

SEQ ID NO: 40779 - protein, 127 aa, Artificial Sequence
  Chemically Synthesized
QVQLQESGGGLVQAGGSLRLSCAASGTISSFDTMGWYRQAPGKERELVAAIADNGTTTNYADSVKGRFTISRDNAKNTVYLQMNSLKPEDTAVYYCAAFANPTAWLDYYLEDVHLYWGQGTQVTVSS

SEQ ID NO: 40780 - protein, 122 aa, Artificial Sequence
  Chemically Synthesized
QVQLQESGGGLVQAGGSLRLSCAASGNISDAIDMGWYRQAPGKEREFVASIGKGTTTYYADSVKGRFTISRDNAKNTVYLQMNSLKPEDTAVYYCAASGDTDVVSLDQFGYWGQGTQVTVSS

SEQ ID NO: 40781 - protein, 118 aa, Artificial Sequence
  Chemically Synthesized
QVQLQESGGGLVQAGGSLRLSCAASGYIFAEATMGWYRQAPGKEREFVASIAGGSSTNYADSVKGRFTISRDNAKNTVYLQMNSLKPEDTAVYYCAVRLQVLTQHAYWGQGTQVTVSS

SEQ ID NO: 40782 - protein, 118 aa, Artificial Sequence
  Chemically Synthesized
QVQLQESGGGLVQAGGSLRLSCAASGTISPDDVMGWYRQAPGKERELVASIAQGTSTYYADSVKGRFTISRDNAKNTVYLQMNSLKPEDTAVYYCAVGTIFSVQYLYWGQGTQVTVSS

SEQ ID NO: 40783 - protein, 118 aa, Artificial Sequence
  Chemically Synthesized
QVQLQESGGGLVQAGGSLRLSCAASGYIFYYASMGWYRQAPGKERELVAGINDGGITYYADSVKGRFTISRDNAKNTVYLQMNSLKPEDTAVYYCAVPYNGLQGHGYWGQGTQVTVSS

SEQ ID NO: 40784 - protein, 120 aa, Artificial Sequence
  Chemically Synthesized
QVQLQESGGGLVQAGGSLRLSCAASGYISSAEAMGWYRQAPGKEREFVAAIGNGGLPYADSVKGRFTISRDNAKNTVYLQMNSLKPEDTAVYYCAVYNDYGYAINGNIYWGQGTQVTVSS

SEQ ID NO: 40785 - protein, 118 aa, Artificial Sequence
  Chemically Synthesized
QVQLQESGGGLVQAGGSLRLSCAASGTISVEHAMGWYRQAPGKERELVATIAYGSITNYADSVKGRFTISRDNAKNTVYLQMNSLKPEDTAVYYCAVFYQDGPDYPYWGQGTQVTVSS

SEQ ID NO: 40786 - protein, 122 aa, Artificial Sequence
  Chemically Synthesized
QVQLQESGGGLVQAGGSLRLSCAASGTIFVYDDMGWYRQAPGKERELVATIDDGTTTYYADSVKGRFTISRDNAKNTVYLQMNSLKPEDTAVYYCAVGLDYETLANITHPYWGQGTQVTVSS

SEQ ID NO: 40787 - protein, 118 aa, Artificial Sequence
  Chemically Synthesized
QVQLQESGGGLVQAGGSLRLSCAASGTIFARGYMGWYRQAPGKERELVASISYGASTYYADSVKGRFTISRDNAKNTVYLQMNSLKPEDTAVYYCAVDTFSYRIYVYWGQGTQVTVSS

SEQ ID NO: 40788 - protein, 116 aa, Artificial Sequence
  Chemically Synthesized
QVQLQESGGGLVQAGGSLRLSCAASGNIFDINLMGWYRQAPGKERELVAGITNGSTTNYADSVKGRFTISRDNAKNTVYLQMNSLKPEDTAVYYCAGPYDGGFPYWGQGTQVTVSS

SEQ ID NO: 40789 - protein, 121 aa, Artificial Sequence
  Chemically Synthesized
QVQLQESGGGLVQAGGSLRLSCAASGSIFQPHYMGWYRQAPGKEREFVASINTGTITNYADSVKGRFTISRDNAKNTVYLQMNSLKPEDTAVYYCAAYKAQRAWSSVSMYWGQGTQVTVSS

SEQ ID NO: 40790 - protein, 121 aa, Artificial Sequence
  Chemically Synthesized
QVQLQESGGGLVQAGGSLRLSCAASGTIFGGYGMGWYRQAPGKEREFVATIDYGTITYYADSVKGRFTISRDNAKNTVYLQMNSLKPEDTAVYYCAVGVPLDENSFRSFYWGQGTQVTVSS

SEQ ID NO: 40791 - protein, 118 aa, Artificial Sequence
  Chemically Synthesized
QVQLQESGGGLVQAGGSLRLSCAASGNIFDWDVMGWYRQAPGKERELVATIDYGSTTYYADSVKGRFTISRDNAKNTVYLQMNSLKPEDTAVYYCAVLRPPRYGLDYWGQGTQVTVSS

SEQ ID NO: 40792 - protein, 118 aa, Artificial Sequence
  Chemically Synthesized
QVQLQESGGGLVQAGGSLRLSCAASGNISLYTGMGWYRQAPGKEREFVATIAGGTITYYADSVKGRFTISRDNAKNTVYLQMNSLKPEDTAVYYCAVYGEYDYPFGYWGQGTQVTVSS

SEQ ID NO: 40793 - protein, 122 aa, Artificial Sequence
  Chemically Synthesized
QVQLQESGGGLVQAGGSLRLSCAASGTISDWIVMGWYRQAPGKEREFVATIGNGAITYYADSVKGRFTISRDNAKNTVYLQMNSLKPEDTAVYYCAVYGEGITAYAYIYPYWGQGTQVTVSS

SEQ ID NO: 40794 - protein, 121 aa, Artificial Sequence
  Chemically Synthesized
QVQLQESGGGLVQAGGSLRLSCAASGSISYSTMGWYRQAPGKEREFVAAIAGGSTTYYADSVKGRFTISRDNAKNTVYLQMNSLKPEDTAVYYCAVAAGERKAATPFHIYWGQGTQVTVSS

SEQ ID NO: 40795 - protein, 124 aa, Artificial Sequence
  Chemically Synthesized
QVQLQESGGGLVQAGGSLRLSCAASGTIFTRSMGWYRQAPGKEREFVASIAYGATTNYADSVKGRFTISRDNAKNTVYLQMNSLKPEDTAVYYCAVVYPPHGNHYENANFPSYWGQGTQVTVSS

SEQ ID NO: 40796 - protein, 121 aa, Artificial Sequence
  Chemically Synthesized
QVQLQESGGGLVQAGGSLRLSCAASGYISARYDMGWYRQAPGKERELVASINYGGTTYYADSVKGRFTISRDNAKNTVYLQMNSLKPEDTAVYYCAADTRVSLNTLVLIYWGQGTQVTVSS

SEQ ID NO: 40797 - protein, 126 aa, Artificial Sequence
  Chemically Synthesized
QVQLQESGGGLVQAGGSLRLSCAASGTISWYRYMGWYRQAPGKEREFVASIGHGGNTYYADSVKGRFTISRDNAKNTVYLQMNSLKPEDTAVYYCAVLDGLEVNVDEPQERGLTYWGQGTQVTVSS

SEQ ID NO: 40798 - protein, 117 aa, Artificial Sequence
  Chemically Synthesized
QVQLQESGGGLVQAGGSLRLSCAASGTISVVDWMGWYRQAPGKERELVATIAYGTSTYYADSVKGRFTISRDNAKNTVYLQMNSLKPEDTAVYYCAAFRQDDYYYYWGQGTQVTVSS

SEQ ID NO: 40799 - protein, 118 aa, Artificial Sequence
  Chemically Synthesized
QVQLQESGGGLVQAGGSLRLSCAASGYIFGQDSMGWYRQAPGKEREFVASISDGAITYYADSVKGRFTISRDNAKNTVYLQMNSLKPEDTAVYYCAVPGEIGGRYLYWGQGTQVTVSS

SEQ ID NO: 40800 - protein, 118 aa, Artificial Sequence
  Chemically Synthesized
QVQLQESGGGLVQAGGSLRLSCAASGYIFPYFAMGWYRQAPGKEREFVATIATGASTYYADSVKGRFTISRDNAKNTVYLQMNSLKPEDTAVYYCAVGRYTGYGFGYWGQGTQVTVSS

SEQ ID NO: 40801 - protein, 122 aa, Artificial Sequence
  Chemically Synthesized
QVQLQESGGGLVQAGGSLRLSCAASGSISRDSFMGWYRQAPGKEREFVATIAYGGSTNYADSVKGRFTISRDNAKNTVYLQMNSLKPEDTAVYYCAVLVRGDVQFGVLHTYWGQGTQVTVSS

SEQ ID NO: 40802 - protein, 121 aa, Artificial Sequence
  Chemically Synthesized
QVQLQESGGGLVQAGGSLRLSCAASGTIFGGYTMGWYRQAPGKERELVASIDDGGTTYYADSVKGRFTISRDNAKNTVYLQMNSLKPEDTAVYYCAVVYDTRTLYSWFGYWGQGTQVTVSS

SEQ ID NO: 40803 - protein, 122 aa, Artificial Sequence
  Chemically Synthesized
QVQLQESGGGLVQAGGSLRLSCAASGTISYPGTMGWYRQAPGKERELVATISYGSITNYADSVKGRFTISRDNAKNTVYLQMNSLKPEDTAVYYCAVAATSHRRYVVGFKYWGQGTQVTVSS

SEQ ID NO: 40804 - protein, 121 aa, Artificial Sequence
  Chemically Synthesized
QVQLQESGGGLVQAGGSLRLSCAASGSISVPFYMGWYRQAPGKEREFVAAIGQGITYYADSVKGRFTISRDNAKNTVYLQMNSLKPEDTAVYYCAAPYIGEDVNEYYYTYWGQGTQVTVSS

SEQ ID NO: 40805 - protein, 122 aa, Artificial Sequence
  Chemically Synthesized
QVQLQESGGGLVQAGGSLRLSCAASGSIFDFGRMGWYRQAPGKERELVAGITYGGSTNYADSVKGRFTISRDNAKNTVYLQMNSLKPEDTAVYYCAAAYYADGAYGYAFIYWGQGTQVTVSS

SEQ ID NO: 40806 - protein, 126 aa, Artificial Sequence
  Chemically Synthesized
QVQLQESGGGLVQAGGSLRLSCAASGTIFGYDSMGWYRQAPGKEREFVAGINVGATTYYADSVKGRFTISRDNAKNTVYLQMNSLKPEDTAVYYCAVSFRGRDKWYAVFRSWHTYWGQGTQVTVSS

SEQ ID NO: 40807 - protein, 126 aa, Artificial Sequence
  Chemically Synthesized
QVQLQESGGGLVQAGGSLRLSCAASGSIFRPLYMGWYRQAPGKERELVASIDFGGITYYADSVKGRFTISRDNAKNTVYLQMNSLKPEDTAVYYCAVTYYRTRWGTIRGNRYFDYWGQGTQVTVSS

SEQ ID NO: 40808 - protein, 118 aa, Artificial Sequence
  Chemically Synthesized
QVQLQESGGGLVQAGGSLRLSCAASGNIFKAIRMGWYRQAPGKEREFVAGIAYGTTTNYADSVKGRFTISRDNAKNTVYLQMNSLKPEDTAVYYCAARGLGNRLYPYWGQGTQVTVSS

SEQ ID NO: 40809 - protein, 126 aa, Artificial Sequence
  Chemically Synthesized
QVQLQESGGGLVQAGGSLRLSCAASGNISDHYIMGWYRQAPGKERELVAGIALGAITYYADSVKGRFTISRDNAKNTVYLQMNSLKPEDTAVYYCAAYYGLISAYSVQSLTLYEYWGQGTQVTVSS

SEQ ID NO: 40810 - protein, 118 aa, Artificial Sequence
  Chemically Synthesized
QVQLQESGGGLVQAGGSLRLSCAASGTIFYHDQMGWYRQAPGKERELVATIGSGGTTYYADSVKGRFTISRDNAKNTVYLQMNSLKPEDTAVYYCAAVSPVYQRFLYWGQGTQVTVSS

SEQ ID NO: 40811 - protein, 118 aa, Artificial Sequence
  Chemically Synthesized
QVQLQESGGGLVQAGGSLRLSCAASGNIFIILVMGWYRQAPGKEREFVATITQGAITYYADSVKGRFTISRDNAKNTVYLQMNSLKPEDTAVYYCAAVQDWGVNHSYWGQGTQVTVSS

SEQ ID NO: 40812 - protein, 122 aa, Artificial Sequence
  Chemically Synthesized
QVQLQESGGGLVQAGGSLRLSCAASGYISTHYYMGWYRQAPGKERELVATINVGATTYYADSVKGRFTISRDNAKNTVYLQMNSLKPEDTAVYYCAAQRYYRLWQNRWHLYWGQGTQVTVSS

SEQ ID NO: 40813 - protein, 118 aa, Artificial Sequence
  Chemically Synthesized
QVQLQESGGGLVQAGGSLRLSCAASGTIFLGPSMGWYRQAPGKERELVAGIGTGTSTYYADSVKGRFTISRDNAKNTVYLQMNSLKPEDTAVYYCAAAIRYYGEHEYWGQGTQVTVSS

SEQ ID NO: 40814 - protein, 122 aa, Artificial Sequence
  Chemically Synthesized
QVQLQESGGGLVQAGGSLRLSCAASGYIFRDYYMGWYRQAPGKERELVAAIGTGGITYYADSVKGRFTISRDNAKNTVYLQMNSLKPEDTAVYYCAAVVTRYRYRLTRYTYWGQGTQVTVSS

SEQ ID NO: 40815 - protein, 118 aa, Artificial Sequence
  Chemically Synthesized
QVQLQESGGGLVQAGGSLRLSCAASGTISPRKAMGWYRQAPGKERELVATISKGGTTYYADSVKGRFTISRDNAKNTVYLQMNSLKPEDTAVYYCAVRGATLYYLSYWGQGTQVTVSS

SEQ ID NO: 40816 - protein, 122 aa, Artificial Sequence
  Chemically Synthesized
QVQLQESGGGLVQAGGSLRLSCAASGTIFRYWYMGWYRQAPGKERELVAGIDRGSSTNYADSVKGRFTISRDNAKNTVYLQMNSLKPEDTAVYYCAALLKRAWPFDWWYDYWGQGTQVTVSS

SEQ ID NO: 40817 - protein, 118 aa, Artificial Sequence
  Chemically Synthesized
QVQLQESGGGLVQAGGSLRLSCAASGYIFYLRRMGWYRQAPGKEREFVASIGRGTNTYYADSVKGRFTISRDNAKNTVYLQMNSLKPEDTAVYYCAVRGVRYEKYSYWGQGTQVTVSS

SEQ ID NO: 40818 - protein, 118 aa, Artificial Sequence
  Chemically Synthesized
QVQLQESGGGLVQAGGSLRLSCAASGYIFSTDYMGWYRQAPGKEREFVASIANGANTYYADSVKGRFTISRDNAKNTVYLQMNSLKPEDTAVYYCAAVAPLVDIHPYWGQGTQVTVSS

SEQ ID NO: 40819 - protein, 125 aa, Artificial Sequence
  Chemically Synthesized
QVQLQESGGGLVQAGGSLRLSCAASGTISTREYMGWYRQAPGKEREFVASIDDGGSTYYADSVKGRFTISRDNAKNTVYLQMNSLKPEDTAVYYCAVNAGAYSAYDLYGGLYDYWGQGTQVTVSS

SEQ ID NO: 40820 - protein, 116 aa, Artificial Sequence
  Chemically Synthesized
QVQLQESGGGLVQAGGSLRLSCAASGSWSDLMGWYRQAPGKERELVATIGHGSITNYADSVKGRFTISRDNAKNTVYLQMNSLKPEDTAVYYCAATNADPAAYVYWGQGTQVTVSS

SEQ ID NO: 40821 - protein, 122 aa, Artificial Sequence
  Chemically Synthesized
QVQLQESGGGLVQAGGSLRLSCAASGNISRYKAMGWYRQAPGKEREFVAGIGYGGTTYYADSVKGRFTISRDNAKNTVYLQMNSLKPEDTAVYYCAARQIAYDGTRRAFYYWGQGTQVTVSS

SEQ ID NO: 40822 - protein, 118 aa, Artificial Sequence
  Chemically Synthesized
QVQLQESGGGLVQAGGSLRLSCAASGTISWWGGMGWYRQAPGKERELVAAIAVGGNTNYADSVKGRFTISRDNAKNTVYLQMNSLKPEDTAVYYCAVATPYLNDHRYWGQGTQVTVSS

SEQ ID NO: 40823 - protein, 126 aa, Artificial Sequence
  Chemically Synthesized
QVQLQESGGGLVQAGGSLRLSCAASGTISYARVMGWYRQAPGKEREFVAAIGTGANTYYADSVKGRFTISRDNAKNTVYLQMNSLKPEDTAVYYCAAYPYLHQDRGSIRNYWYGYWGQGTQVTVSS

SEQ ID NO: 40824 - protein, 118 aa, Artificial Sequence
  Chemically Synthesized
QVQLQESGGGLVQAGGSLRLSCAASGSIFTKQVMGWYRQAPGKERELVAAIGAGASTYYADSVKGRFTISRDNAKNTVYLQMNSLKPEDTAVYYCAVLYVYHRYHVYWGQGTQVTVSS

SEQ ID NO: 40825 - protein, 118 aa, Artificial Sequence
  Chemically Synthesized
QVQLQESGGGLVQAGGSLRLSCAASGYISDSLGMGWYRQAPGKERELVATIGNGTTTNYADSVKGRFTISRDNAKNTVYLQMNSLKPEDTAVYYCAVRQDERIGFYYWGQGTQVTVSS

SEQ ID NO: 40826 - protein, 117 aa, Artificial Sequence
  Chemically Synthesized
QVQLQESGGGLVQAGGSLRLSCAASGTIFYGDIMGWYRQAPGKERELVAAINYGGTTNYADSVKGRFTISRDNAKNTVYLQMNSLKPEDTAVYYCAVTNEYGTVFYWGQGTQVTVSS

SEQ ID NO: 40827 - protein, 118 aa, Artificial Sequence
  Chemically Synthesized
QVQLQESGGGLVQAGGSLRLSCAASGYISPDENMGWYRQAPGKERELVAGISEGGITNYADSVKGRFTISRDNAKNTVYLQMNSLKPEDTAVYYCAVYGLTLQHHGYWGQGTQVTVSS

SEQ ID NO: 40828 - protein, 119 aa, Artificial Sequence
  Chemically Synthesized
QVQLQESGGGLVQAGGSLRLSCAASGYISVAIYMGWYRQAPGKEREFVGNTNYADSVKGRFTISRDNAKNTVYLQMNSLKPEDTAVYYCAVDLPRVNRWASLLVNCFYWGQGTQVTVSS

SEQ ID NO: 40829 - protein, 118 aa, Artificial Sequence
  Chemically Synthesized
QVQLQESGGGLVQAGGSLRLSCAASGYIFKTESMGWYRQAPGKERELVASIGYGATTYYADSVKGRFTISRDNAKNTVYLQMNSLKPEDTAVYYCAVGEGRAAALGYWGQGTQVTVSS

SEQ ID NO: 40830 - protein, 126 aa, Artificial Sequence
  Chemically Synthesized
QVQLQESGGGLVQAGGSLRLSCAASGTIFSWALMGWYRQAPGKERELVAAIGPGASTYYADSVKGRFTISRDNAKNTVYLQMNSLKPEDTAVYYCAADGHYGEAYEYDWAYYHDYWGQGTQVTVSS

SEQ ID NO: 40831 - protein, 117 aa, Artificial Sequence
  Chemically Synthesized
QVQLQESGGGLVQAGGSLRLSCAASGSIFPRRYMGWYRQAPGKEREFVAAISPGTSTYYADSVKGRFTISRDNAKNTVYLQMNSLKPEDTAVYYCAAARRTSRYVYWGQGTQVTVSS

SEQ ID NO: 40832 - protein, 126 aa, Artificial Sequence
  Chemically Synthesized
QVQLQESGGGLVQAGGSLRLSCAASGSIFRYGDMGWYRQAPGKERELVAGINAGGITYYADSVKGRFTISRDNAKNTVYLQMNSLKPEDTAVYYCAVWGWTTSVSPDYDPKRHPYWGQGTQVTVSS

SEQ ID NO: 40833 - protein, 118 aa, Artificial Sequence
  Chemically Synthesized
QVQLQESGGGLVQAGGSLRLSCAASGTIFGLYVMGWYRQAPGKERELVASITLGASTYYADSVKGRFTISRDNAKNTVYLQMNSLKPEDTAVYYCAVVFGQESLHKYWGQGTQVTVSS

SEQ ID NO: 40834 - protein, 118 aa, Artificial Sequence
  Chemically Synthesized
QVQLQESGGGLVQAGGSLRLSCAASGYISGDRYMGWYRQAPGKEREFVASIDLGGNTNYADSVKGRFTISRDNAKNTVYLQMNSLKPEDTAVYYCAADSRTPELHTYWGQGTQVTVSS

SEQ ID NO: 40835 - protein, 122 aa, Artificial Sequence
  Chemically Synthesized
QVQLQESGGGLVQAGGSLRLSCAASGYISYGHVMGWYRQAPGKEREFVAAINDGANTYYADSVKGRFTISRDNAKNTVYLQMNSLKPEDTAVYYCAVPRRRNSATYPRFVYWGQGTQVTVSS

SEQ ID NO: 40836 - protein, 117 aa, Artificial Sequence
  Chemically Synthesized
QVQLQESGGGLVQAGGSLRLSCAASGTISGALTMGWYRQAPGKEREFVAAISYGGITNYADSVKGRFTISRDNAKNTVYLQMNSLKPEDTAVYYCAVYWWWYAHGYWGQGTQVTVSS

SEQ ID NO: 40837 - protein, 122 aa, Artificial Sequence
  Chemically Synthesized
QVQLQESGGGLVQAGGSLRLSCAASGYIFGPAIMGWYRQAPGKEREFVATITRGSSTYYADSVKGRFTISRDNAKNTVYLQMNSLKPEDTAVYYCAAGNWLGLIYGGRHSYWGQGTQVTVSS

SEQ ID NO: 40838 - protein, 122 aa, Artificial Sequence
  Chemically Synthesized
QVQLQESGGGLVQAGGSLRLSCAASGYISLIYVMGWYRQAPGKEREFVATIDYGANTYYADSVKGRFTISRDNAKNTVYLQMNSLKPEDTAVYYCAADLYRPDYDGADFYYWGQGTQVTVSS

SEQ ID NO: 40839 - protein, 125 aa, Artificial Sequence
  Chemically Synthesized
QVQLQESGGGLVQAGGSLRLSCAASGTISNYNEMGWYRQAPGKERELVAGIADGGSTNYADSVKGRFTISRDNAKNTVYLQMNSLKPEDTAVYYCAVRTLPTDLYFSDSLKTFYWGQGTQVTVSS

SEQ ID NO: 40840 - protein, 122 aa, Artificial Sequence
  Chemically Synthesized
QVQLQESGGGLVQAGGSLRLSCAASGNISAYYYMGWYRQAPGKEREFVASINPGGNTNYADSVKGRFTISRDNAKNTVYLQMNSLKPEDTAVYYCAGAQFYPAAYYVDYYYWGQGTQVTVSS

SEQ ID NO: 40841 - protein, 118 aa, Artificial Sequence
  Chemically Synthesized
QVQLQESGGGLVQAGGSLRLSCAASGTIFQDYYMGWYRQAPGKEREFVAAIAGGSSTNYADSVKGRFTISRDNAKNTVYLQMNSLKPEDTAVYYCAAYDLRASGYDYWGQGTQVTVSS

SEQ ID NO: 40842 - protein, 123 aa, Artificial Sequence
  Chemically Synthesized
QVQLQESGGGLVQAGGSLRLSCAASGSISGWTSMGWYRQAPGKERELVASIDDGGAITYYADSVKGRFTISRDNAKNTVYLQMNSLKPEDTAVYYCAVYPIDYPRATLGLRYWGQGTQVTVSS

SEQ ID NO: 40843 - protein, 122 aa, Artificial Sequence
  Chemically Synthesized
QVQLQESGGGLVQAGGSLRLSCAASGYIFYTYDMGWYRQAPGKERELVATIARGGITNYADSVKGRFTISRDNAKNTVYLQMNSLKPEDTAVYYCAVRRAVGYRWSYVHEYWGQGTQVTVSS

SEQ ID NO: 40844 - protein, 118 aa, Artificial Sequence
  Chemically Synthesized
QVQLQESGGGLVQAGGSLRLSCAASGTISLYRDMGWYRQAPGKERELVAAIAIGTTTYYADSVKGRFTISRDNAKNTVYLQMNSLKPEDTAVYYCAAKYYTLGTLGYWGQGTQVTVSS

SEQ ID NO: 40845 - protein, 118 aa, Artificial Sequence
  Chemically Synthesized
QVQLQESGGGLVQAGGSLRLSCAASGYISDPFVMGWYRQAPGKEREFVASIGWGASTNYADSVKGRFTISRDNAKNTVYLQMNSLKPEDTAVYYCAVYGYDARVFSYWGQGTQVTVSS

SEQ ID NO: 40846 - protein, 118 aa, Artificial Sequence
  Chemically Synthesized
QVQLQESGGGLVQAGGSLRLSCAASGTISDYYYMGWYRQAPGKERELVAGIGPGATTNYADSVKGRFTISRDNAKNTVYLQMNSLKPEDTAVYYCAANRADTHQALYWGQGTQVTVSS

SEQ ID NO: 40847 - protein, 118 aa, Artificial Sequence
  Chemically Synthesized
QVQLQESGGGLVQAGGSLRLSCAASGYIFRARVMGWYRQAPGKEREFVAAIDRGASTNYADSVKGRFTISRDNAKNTVYLQMNSLKPEDTAVYYCAVGPYYRFWLPYWGQGTQVTVSS

SEQ ID NO: 40848 - protein, 118 aa, Artificial Sequence
  Chemically Synthesized
QVQLQESGGGLVQAGGSLRLSCAASGYIFHYLNMGWYRQAPGKEREFVAGIARGASTYYADSVKGRFTISRDNAKNTVYLQMNSLKPEDTAVYYCAVSYYVTTVFPYWGQGTQVTVSS

SEQ ID NO: 40849 - protein, 122 aa, Artificial Sequence
  Chemically Synthesized
QVQLQESGGGLVQAGGSLRLSCAASGTISDTPWMGWYRQAPGKEREFVASISVGTNTNYADSVKGRFTISRDNAKNTVYLQMNSLKPEDTAVYYCAAWYRWRTYYGRRHGYWGQGTQVTVSS

SEQ ID NO: 40850 - protein, 118 aa, Artificial Sequence
  Chemically Synthesized
QVQLQESGGGLVQAGGSLRLSCAASGNISAATGMGWYRQAPGKEREFVATINAGSITNYADSVKGRFTISRDNAKNTVYLQMNSLKPEDTAVYYCAAYDLTSLTYDYWGQGTQVTVSS

SEQ ID NO: 40851 - protein, 118 aa, Artificial Sequence
  Chemically Synthesized
QVQLQESGGGLVQAGGSLRLSCAASGYISSYGFMGWYRQAPGKERELVAAISTGGSTNYADSVKGRFTISRDNAKNTVYLQMNSLKPEDTAVYYCAAVRGGYYVFQYWGQGTQVTVSS

SEQ ID NO: 40852 - protein, 117 aa, Artificial Sequence
  Chemically Synthesized
QVQLQESGGGLVQAGGSLRLSCAASGSISSLWYMGWYRQAPGKERELVAGIAAGTNTNYADSVKGRFTISRDNAKNTVYLQMNSLKPEDTAVYYCAAYNVLSSLLYWGQGTQVTVSS

SEQ ID NO: 40853 - protein, 116 aa, Artificial Sequence
  Chemically Synthesized
QVQLQESGGGLVQAGGSLRLSCAASGNISSELMGWYRQAPGKERELVATIGIGGTTNYADSVKGRFTISRDNAKNTVYLQMNSLKPEDTAVYYCAAGVYGEGLGYWGQGTQVTVSS

SEQ ID NO: 40854 - protein, 126 aa, Artificial Sequence
  Chemically Synthesized
QVQLQESGGGLVQAGGSLRLSCAASGNIFLVTVMGWYRQAPGKEREFVASIASGAITNYADSVKGRFTISRDNAKNTVYLQMNSLKPEDTAVYYCAAGYDLYLLGYYPQDHDHYYWGQGTQVTVSS

SEQ ID NO: 40855 - protein, 126 aa, Artificial Sequence
  Chemically Synthesized
QVQLQESGGGLVQAGGSLRLSCAASGTISNGGSMGWYRQAPGKERELVATIDNGSTTYYADSVKGRFTISRDNAKNTVYLQMNSLKPEDTAVYYCAATWYDVWQDSYYIYPRHAYWGQGTQVTVSS

SEQ ID NO: 40856 - protein, 117 aa, Artificial Sequence
  Chemically Synthesized
QVQLQESGGGLVQAGGSLRLSCAASGTIFFWRMGWYRQAPGKERELVATIGSGSTTNYADSVKGRFTISRDNAKNTVYLQMNSLKPEDTAVYYCAAGDWFYQPFHYWGQGTQVTVSS

SEQ ID NO: 40857 - protein, 121 aa, Artificial Sequence
  Chemically Synthesized
QVQLQESGGGLVQAGGSLRLSCAASGTISNADYMGWYRQAPGKEREFVATINDGSSTNYADSVKGRFTISRDNAKNTVYLQMNSLKPEDTAVYYCAALWLSVLLTCGTLYWGQGTQVTVSS

SEQ ID NO: 40858 - protein, 122 aa, Artificial Sequence
  Chemically Synthesized
QVQLQESGGGLVQAGGSLRLSCAASGSISTGAYMGWYRQAPGKERELVASINRGSITNYADSVKGRFTISRDNAKNTVYLQMNSLKPEDTAVYYCALYVIPQLTPLHDLYYWGQGTQVTVSS

SEQ ID NO: 40859 - protein, 122 aa, Artificial Sequence
  Chemically Synthesized
QVQLQESGGGLVQAGGSLRLSCAASGNIFRYRGMGWYRQAPGKERELVAAINYGATTYYADSVKGRFTISRDNAKNTVYLQMNSLKPEDTAVYYCAAGGYRTYRYYYGYPYWGQGTQVTVSS

SEQ ID NO: 40860 - protein, 126 aa, Artificial Sequence
  Chemically Synthesized
QVQLQESGGGLVQAGGSLRLSCAASGTIFTGVFMGWYRQAPGKEREFVAAIGGGATTNYADSVKGRFTISRDNAKNTVYLQMNSLKPEDTAVYYCAAESHTTDSHPGTERSDHQYWGQGTQVTVSS

SEQ ID NO: 40861 - protein, 127 aa, Artificial Sequence
  Chemically Synthesized
QVQLQESGGGLVQAGGSLRLSCAASGSISGGTPMGWYRQAPGKEREFVAAINYGGSTYYADSVKGRFTISRDNAKNTVYLQMNSLKPEDTAVYYCAAYVYEAYRDNFTTTTRLYRYWGQGTQVTVSS

SEQ ID NO: 40862 - protein, 118 aa, Artificial Sequence
  Chemically Synthesized
QVQLQESGGGLVQAGGSLRLSCAASGYIFRAYNMGWYRQAPGKERELVATISNGSSTYYADSVKGRFTISRDNAKNTVYLQMNSLKPEDTAVYYCAVGLVVDVDHAYWGQGTQVTVSS

SEQ ID NO: 40863 - protein, 126 aa, Artificial Sequence
  Chemically Synthesized
QVQLQESGGGLVQAGGSLRLSCAASGNISIDAVMGWYRQAPGKERELVAAISRGGITNYADSVKGRFTISRDNAKNTVYLQMNSLKPEDTAVYYCAVYFYAQPVWDVRRYTRLGYWGQGTQVTVSS

SEQ ID NO: 40864 - protein, 118 aa, Artificial Sequence
  Chemically Synthesized
QVQLQESGGGLVQAGGSLRLSCAASGSISSLWVMGWYRQAPGKEREFVAAIDYGGITYYADSVKGRFTISRDNAKNTVYLQMNSLKPEDTAVYYCAVHYDGLYDYTYWGQGTQVTVSS

SEQ ID NO: 40865 - protein, 123 aa, Artificial Sequence
  Chemically Synthesized
QVQLQESGGGLVQAGGSLRLSCAASGTIFIAYYMGWYRQAPGKERELVAIWVVLPYADSVKGRFTISRDNAKNTVYLQMNSLKPEDTAVYYCAVYGDYDDWQYDDDYSEHRYWGQGTQVTVSS

SEQ ID NO: 40866 - protein, 118 aa, Artificial Sequence
  Chemically Synthesized
QVQLQESGGGLVQAGGSLRLSCAASGTISYRTYMGWYRQAPGKERELVASISTGGTTYYADSVKGRFTISRDNAKNTVYLQMNSLKPEDTAVYYCAAVAADTWPFYYWGQGTQVTVSS

SEQ ID NO: 40867 - protein, 119 aa, Artificial Sequence
  Chemically Synthesized
QVQLQESGGGLVQAGGSLRLSCAASGNISPGYTMGWYRQAPGKERELVATIGGGGITNYADSVKGRFTISRDNAKNTVYLQMNSLKPEDTAVYYCAAGWRRNPFPHEYWGQGTQVTVSS

SEQ ID NO: 40868 - protein, 126 aa, Artificial Sequence
  Chemically Synthesized
QVQLQESGGGLVQAGGSLRLSCAASGTISLLTVMGWYRQAPGKEREFVASITGGASTYYADSVKGRFTISRDNAKNTVYLQMNSLKPEDTAVYYCAAYGTDYPYGYRGWRQRYYYWGQGTQVTVSS

SEQ ID NO: 40869 - protein, 131 aa, Artificial Sequence
  Chemically Synthesized
QVQLQESGGGLVQAGGSLRLSCAASGTISRTQRMGWYRQAPGKEREFVATISGGGITNYADSVKGRFTISRDNAKNTVYLQMNSLKPEDTAVYYCAARNVYRVYSPDQNGYIRKPRYFTYWGQGTQVTVSS

SEQ ID NO: 40870 - protein, 118 aa, Artificial Sequence
  Chemically Synthesized
QVQLQESGGGLVQAGGSLRLSCAASGYISSAPNMGWYRQAPGKEREFVAAITRGGSTYYADSVKGRFTISRDNAKNTVYLQMNSLKPEDTAVYYCAVDARYYRFLRYWGQGTQVTVSS

SEQ ID NO: 40871 - protein, 122 aa, Artificial Sequence
  Chemically Synthesized
QVQLQESGGGLVQAGGSLRLSCAASGSISSYYTMGWYRQAPGKEREFVASINTGATTNYADSVKGRFTISRDNAKNTVYLQMNSLKPEDTAVYYCAVELYRYQTDYAGLWYWGQGTQVTVSS

SEQ ID NO: 40872 - protein, 122 aa, Artificial Sequence
  Chemically Synthesized
QVQLQESGGGLVQAGGSLRLSCAASGSISTHRWMGWYRQAPGKERELVAGIGAGASTYYADSVKGRFTISRDNAKNTVYLQMNSLKPEDTAVYYCAVLNAYTGRRFSQHYYWGQGTQVTVSS

SEQ ID NO: 40873 - protein, 126 aa, Artificial Sequence
  Chemically Synthesized
QVQLQESGGGLVQAGGSLRLSCAASGSIFWYLYMGWYRQAPGKERELVAGISYGGNTYYADSVKGRFTISRDNAKNTVYLQMNSLKPEDTAVYYCAATGNDWRGAWYYGFNTHSYWGQGTQVTVSS

SEQ ID NO: 40874 - protein, 122 aa, Artificial Sequence
  Chemically Synthesized
QVQLQESGGGLVQAGGSLRLSCAASGYIFTFRYMGWYRQAPGKEREFVATISSGGITNYADSVKGRFTISRDNAKNTVYLQMNSLKPEDTAVYYCAARASGYRPYRYAHFYWGQGTQVTVSS

SEQ ID NO: 40875 - protein, 122 aa, Artificial Sequence
  Chemically Synthesized
QVQLQESGGGLVQAGGSLRLSCAASGTISYHHRMGWYRQAPGKERELVASINDGATTYYADSVKGRFTISRDNAKNTVYLQMNSLKPEDTAVYYCAANRRSYVHAYRYYGYWGQGTQVTVSS

SEQ ID NO: 40876 - protein, 126 aa, Artificial Sequence
  Chemically Synthesized
QVQLQESGGGLVQAGGSLRLSCAASGSIFFSFYMGWYRQAPGKEREFVASISRGGNTYYADSVKGRFTISRDNAKNTVYLQMNSLKPEDTAVYYCAANRARYPVLYYQRGWTHRYWGQGTQVTVSS

SEQ ID NO: 40877 - protein, 122 aa, Artificial Sequence
  Chemically Synthesized
QVQLQESGGGLVQAGGSLRLSCAASGTIFRRWRMGWYRQAPGKEREFVATIGTGATTYYADSVKGRFTISRDNAKNTVYLQMNSLKPEDTAVYYCAVFTFRRGTYAGWYKYWGQGTQVTVSS

SEQ ID NO: 40878 - protein, 118 aa, Artificial Sequence
  Chemically Synthesized
QVQLQESGGGLVQAGGSLRLSCAASGSIFRARSMGWYRQAPGKEREFVAAIGIGGTTYYADSVKGRFTISRDNAKNTVYLQMNSLKPEDTAVYYCAVRSFRYHGHGYWGQGTQVTVSS

SEQ ID NO: 40879 - protein, 117 aa, Artificial Sequence
  Chemically Synthesized
QVQLQESGGGLVQAGGSLRLSCAASGSISPDTQMGWYRQAPGKERELVAAIDAGSTTYYADSVKGRFTISRDNAKNTVYLQMNSLKPEDTAVYYCAAKAIWRSIFYWGQGTQVTVSS

SEQ ID NO: 40880 - protein, 118 aa, Artificial Sequence
  Chemically Synthesized
QVQLQESGGGLVQAGGSLRLSCAASGNISDYGTMGWYRQAPGKEREFVAAISYGASTNYADSVKGRFTISRDNAKNTVYLQMNSLKPEDTAVYYCAVYLNIYGNHAYWGQGTQVTVSS

SEQ ID NO: 40881 - protein, 126 aa, Artificial Sequence
  Chemically Synthesized
QVQLQESGGGLVQAGGSLRLSCAASGSISYLSRMGWYRQAPGKEREFVATISLGTITYYADSVKGRFTISRDNAKNTVYLQMNSLKPEDTAVYYCAVVDVDLIRRYYRDYLPFYYWGQGTQVTVSS

SEQ ID NO: 40882 - protein, 125 aa, Artificial Sequence
  Chemically Synthesized
QVQLQESGGGLVQAGGSLRLSCAASGNISYASNMGWYRQAPGKEREFVASIDGTITYYADSVKGRFTISRDNAKNTVYLQMNSLKPEDTAVYYCAASYYLLPLGVALSIPFFDYWGQGTQVTVSS

SEQ ID NO: 40883 - protein, 118 aa, Artificial Sequence
  Chemically Synthesized
QVQLQESGGGLVQAGGSLRLSCAASGNISYFRAMGWYRQAPGKEREFVATINYGANTNYADSVKGRFTISRDNAKNTVYLQMNSLKPEDTAVYYCAARTDRGVRFDYWGQGTQVTVSS

SEQ ID NO: 40884 - protein, 117 aa, Artificial Sequence
  Chemically Synthesized
QVQLQESGGGLVQAGGSLRLSCAASGYIFYGDIMGWYRQAPGKERELVAGIGDGTITYADSVKGRFTISRDNAKNTVYLQMNSLKPEDTAVYYCAALYQYSTVHPYWGQGTQVTVSS

SEQ ID NO: 40885 - protein, 118 aa, Artificial Sequence
  Chemically Synthesized
QVQLQESGGGLVQAGGSLRLSCAASGSISEPPSMGWYRQAPGKERELVAAIAIGSTTYYADSVKGRFTISRDNAKNTVYLQMNSLKPEDTAVYYCAATQAYTSQYPYWGQGTQVTVSS

SEQ ID NO: 40886 - protein, 122 aa, Artificial Sequence
  Chemically Synthesized
QVQLQESGGGLVQAGGSLRLSCAASGNISSSTRMGWYRQAPGKERELVAGIGYGSNTNYADSVKGRFTISRDNAKNTVYLQMNSLKPEDTAVYYCAVKYYEFPQSRLPYPYWGQGTQVTVSS

SEQ ID NO: 40887 - protein, 122 aa, Artificial Sequence
  Chemically Synthesized
QVQLQESGGGLVQAGGSLRLSCAASGTISWYLKMGWYRQAPGKERELVAAINRGATTNYADSVKGRFTISRDNAKNTVYLQMNSLKPEDTAVYYCAAGYWNYAYGRGRHYYWGQGTQVTVSS

SEQ ID NO: 40888 - protein, 123 aa, Artificial Sequence
  Chemically Synthesized
QVQLQESGGGLVQAGGSLRLSCAASGNISGRAVTMGWYRQAPGKEREFVATIGIGGSTYYADSVKGRFTISRDNAKNTVYLQMNSLKPEDTAVYYCAVYRYLRYYYRTTFYYWGQGTQVTVSS

SEQ ID NO: 40889 - protein, 126 aa, Artificial Sequence
  Chemically Synthesized
QVQLQESGGGLVQAGGSLRLSCAASGTISGYEAMGWYRQAPGKERELVAAINNGGTTYYADSVKGRFTISRDNAKNTVYLQMNSLKPEDTAVYYCAVQNDQVGYPRYYHGGSLGYWGQGTQVTVSS

SEQ ID NO: 40890 - protein, 122 aa, Artificial Sequence
  Chemically Synthesized
QVQLQESGGGLVQAGGSLRLSCAASGYIFLYYDMGWYRQAPGKEREFVAAIADGTTTNYADSVKGRFTISRDNAKNTVYLQMNSLKPEDTAVYYCAVGPPIYGYSNFVYYYWGQGTQVTVSS

SEQ ID NO: 40891 - protein, 120 aa, Artificial Sequence
  Chemically Synthesized
QVQLQESGGGLVQAGGSLRLSCAASGTIFWWLIMGWYRQAPGKEREFVASIGTGGTTNYADSVKGRFTISRDNAKNTVYLQMNSLKPEDTAVYYCAVYLRRGSYDPYAYWGQGTQVTVSS

SEQ ID NO: 40892 - protein, 122 aa, Artificial Sequence
  Chemically Synthesized
QVQLQESGGGLVQAGGSLRLSCAASGYIFPYYYMGWYRQAPGKERELVATIARGGTTNYADSVKGRFTISRDNAKNTVYLQMNSLKPEDTAVYYCAVRTWWRGHGLTYHSYWGQGTQVTVSS

SEQ ID NO: 40893 - protein, 118 aa, Artificial Sequence
  Chemically Synthesized
QVQLQESGGGLVQAGGSLRLSCAASGNIFTWRVMGWYRQAPGKERELVATINFGSITNYADSVKGRFTISRDNAKNTVYLQMNSLKPEDTAVYYCAAGRAYGPRFVYWGQGTQVTVSS

SEQ ID NO: 40894 - protein, 117 aa, Artificial Sequence
  Chemically Synthesized
QVQLQESGGGLVQAGGSLRLSCAASGNIFFRTSMGWYRQAPGKEREFVATITGGSTYYADSVKGRFTISRDNAKNTVYLQMNSLKPEDTAVYYCAVWTRVSYTYQYWGQGTQVTVSS

SEQ ID NO: 40895 - protein, 126 aa, Artificial Sequence
  Chemically Synthesized
QVQLQESGGGLVQAGGSLRLSCAASGTISRYPWMGWYRQAPGKERELVATIDDGTITYYADSVKGRFTISRDNAKNTVYLQMNSLKPEDTAVYYCAADELWYYIPDGYFTRYYPYWGQGTQVTVSS

SEQ ID NO: 40896 - protein, 126 aa, Artificial Sequence
  Chemically Synthesized
QVQLQESGGGLVQAGGSLRLSCAASGSIFRGYMGWYRQAPGKEREFVASIDYGGNTYYADSVKGRFTISRDNAKNTVYLQMNSLKPEDTAVYYCAVTRRYAYPPAYWLRNHPHRYWGQGTQVTVSS

SEQ ID NO: 40897 - protein, 122 aa, Artificial Sequence
  Chemically Synthesized
QVQLQESGGGLVQAGGSLRLSCAASGNIFAYVKMGWYRQAPGKERELVATIAYGAITNYADSVKGRFTISRDNAKNTVYLQMNSLKPEDTAVYYCAATRVATSRYRAPFFYWGQGTQVTVSS

SEQ ID NO: 40898 - protein, 122 aa, Artificial Sequence
  Chemically Synthesized
QVQLQESGGGLVQAGGSLRLSCAASGSIFRPLSMGWYRQAPGKEREFVATINRGGSTNYADSVKGRFTISRDNAKNTVYLQMNSLKPEDTAVYYCAARGYERPYYKGRHTYWGQGTQVTVSS

SEQ ID NO: 40899 - protein, 122 aa, Artificial Sequence
  Chemically Synthesized
QVQLQESGGGLVQAGGSLRLSCAASGTISWGRDMGWYRQAPGKEREFVATINWGSSTNYADSVKGRFTISRDNAKNTVYLQMNSLKPEDTAVYYCAARYRPWRGWYYGYDYWGQGTQVTVSS

SEQ ID NO: 40900 - protein, 125 aa, Artificial Sequence
  Chemically Synthesized
QVQLQESGGGLVQAGGSLRLSCAASGYISPDHFMGWYRQAPGKEREFVATIDSVLLPYADSVKGRFTISRDNAKNTVYLQMNSLKPEDTAVYYCAADTFSPDGLYYARSPYHRYWGQGTQVTVSS

SEQ ID NO: 40901 - protein, 126 aa, Artificial Sequence
  Chemically Synthesized
QVQLQESGGGLVQAGGSLRLSCAASGTISYALDMGWYRQAPGKERELVASITIGTSTNYADSVKGRFTISRDNAKNTVYLQMNSLKPEDTAVYYCAVFADSFIPLIYTYDYVYVYWGQGTQVTVSS

SEQ ID NO: 40902 - protein, 118 aa, Artificial Sequence
  Chemically Synthesized
QVQLQESGGGLVQAGGSLRLSCAASGTISPFLVMGWYRQAPGKERELVAGIGFGSSTNYADSVKGRFTISRDNAKNTVYLQMNSLKPEDTAVYYCAALRRFHGRHKYWGQGTQVTVSS

SEQ ID NO: 40903 - protein, 126 aa, Artificial Sequence
  Chemically Synthesized
QVQLQESGGGLVQAGGSLRLSCAASGYISGATKMGWYRQAPGKEREFVAGIAYGATTNYADSVKGRFTISRDNAKNTVYLQMNSLKPEDTAVYYCAVGVAYEALAGYLTLSVYSYWGQGTQVTVSS

SEQ ID NO: 40904 - protein, 126 aa, Artificial Sequence
  Chemically Synthesized
QVQLQESGGGLVQAGGSLRLSCAASGYIFSTPKMGWYRQAPGKEREFVAGISTGANTNYADSVKGRFTISRDNAKNTVYLQMNSLKPEDTAVYYCAATDAFITGYLKNVYWWHQYWGQGTQVTVSS

SEQ ID NO: 40905 - protein, 122 aa, Artificial Sequence
  Chemically Synthesized
QVQLQESGGGLVQAGGSLRLSCAASGYISTRWGMGWYRQAPGKERELVAAIDLGSNTNYADSVKGRFTISRDNAKNTVYLQMNSLKPEDTAVYYCAAQASPRQWYYRSHRYWGQGTQVTVSS

SEQ ID NO: 40906 - protein, 118 aa, Artificial Sequence
  Chemically Synthesized
QVQLQESGGGLVQAGGSLRLSCAASGYIFSHRVMGWYRQAPGKERELVAAIAYGTNTNYADSVKGRFTISRDNAKNTVYLQMNSLKPEDTAVYYCAAYRHYYSRYAYWGQGTQVTVSS

SEQ ID NO: 40907 - protein, 121 aa, Artificial Sequence
  Chemically Synthesized
QVQLQESGGGLVQAGGSLRLSCAASGSISRYTMGWYRQAPGKERELVATISSGTNTNYADSVKGRFTISRDNAKNTVYLQMNSLKPEDTAVYYCAAVAERWTLYPWTFRYWGQGTQVTVSS

SEQ ID NO: 40908 - protein, 118 aa, Artificial Sequence
  Chemically Synthesized
QVQLQESGGGLVQAGGSLRLSCAASGYISLARYMGWYRQAPGKERELVASITNGGNTNYADSVKGRFTISRDNAKNTVYLQMNSLKPEDTAVYYCAAKRRYTYFHPYWGQGTQVTVSS

SEQ ID NO: 40909 - protein, 118 aa, Artificial Sequence
  Chemically Synthesized
QVQLQESGGGLVQAGGSLRLSCAASGTISPPYYMGWYRQAPGKERELVAGIAGGASTNYADSVKGRFTISRDNAKNTVYLQMNSLKPEDTAVYYCAAADYRGWGHPYWGQGTQVTVSS

SEQ ID NO: 40910 - protein, 117 aa, Artificial Sequence
  Chemically Synthesized
QVQLQESGGGLVQAGGSLRLSCAASGTIFRDQSMGWYRQAPGKERELLPLLLKVLLPYADSVKGRFTISRDNAKNTVYLQMNSLKPEDTAVYYCAVQDKRGYTYLYWGQGTQVTVSS

SEQ ID NO: 40911 - protein, 122 aa, Artificial Sequence
  Chemically Synthesized
QVQLQESGGGLVQAGGSLRLSCAASGNIFTYRRMGWYRQAPGKERELVAAIDYGGNTYYADSVKGRFTISRDNAKNTVYLQMNSLKPEDTAVYYCAAGGRDPNRAPYGHRYWGQGTQVTVSS

SEQ ID NO: 40912 - protein, 122 aa, Artificial Sequence
  Chemically Synthesized
QVQLQESGGGLVQAGGSLRLSCAASGNISRRANMGWYRQAPGKEREFVASISGGGITNYADSVKGRFTISRDNAKNTVYLQMNSLKPEDTAVYYCAVGGVYLGYHYARLPYWGQGTQVTVSS

SEQ ID NO: 40913 - protein, 118 aa, Artificial Sequence
  Chemically Synthesized
QVQLQESGGGLVQAGGSLRLSCAASGTISEDTGMGWYRQAPGKERELVAAITVGSSTNYADSVKGRFTISRDNAKNTVYLQMNSLKPEDTAVYYCAVSHQGDADYPYWGQGTQVTVSS

SEQ ID NO: 40914 - protein, 118 aa, Artificial Sequence
  Chemically Synthesized
QVQLQESGGGLVQAGGSLRLSCAASGTIFVNRRMGWYRQAPGKEREFVATIAIGGNTNYADSVKGRFTISRDNAKNTVYLQMNSLKPEDTAVYYCAVHYNRYFLHAYWGQGTQVTVSS

SEQ ID NO: 40915 - protein, 118 aa, Artificial Sequence
  Chemically Synthesized
QVQLQESGGGLVQAGGSLRLSCAASGTIFKSSFMGWYRQAPGKEREFVATINVGSITYYADSVKGRFTISRDNAKNTVYLQMNSLKPEDTAVYYCAAFPSTPRDFSYWGQGTQVTVSS

SEQ ID NO: 40916 - protein, 122 aa, Artificial Sequence
  Chemically Synthesized
QVQLQESGGGLVQAGGSLRLSCAASGTIFYKTQMGWYRQAPGKERELVAAIAYGGTTYYADSVKGRFTISRDNAKNTVYLQMNSLKPEDTAVYYCAVRVSRYRYWVESHRYWGQGTQVTVSS

SEQ ID NO: 40917 - protein, 118 aa, Artificial Sequence
  Chemically Synthesized
QVQLQESGGGLVQAGGSLRLSCAASGSIFAVRYMGWYRQAPGKERELVAGISPGSSTNYADSVKGRFTISRDNAKNTVYLQMNSLKPEDTAVYYCAVAWGAWRRFRYWGQGTQVTVSS

SEQ ID NO: 40918 - protein, 125 aa, Artificial Sequence
  Chemically Synthesized
QVQLQESGGGLVQAGGSLRLSCAASGSISLYKMGWYRQAPGKERELVASITAGASTYYADSVKGRFTISRDNAKNTVYLQMNSLKPEDTAVYYCAARVQVRSRYWSYYHKPYRYWGQGTQVTVSS

SEQ ID NO: 40919 - protein, 118 aa, Artificial Sequence
  Chemically Synthesized
QVQLQESGGGLVQAGGSLRLSCAASGSIFLWRAMGWYRQAPGKEREFVAAISVGTTTNYADSVKGRFTISRDNAKNTVYLQMNSLKPEDTAVYYCAARFFPAPYFRYWGQGTQVTVSS

SEQ ID NO: 40920 - protein, 117 aa, Artificial Sequence
  Chemically Synthesized
QVQLQESGGGLVQAGGSLRLSCAASGNIFQDLGMGWYRQAPGKEREFVATISDGASTNYADSVKGRFTISRDNAKNTVYLQMNSLKPEDTAVYYCAVGYQSCSRFYWGQGTQVTVSS

SEQ ID NO: 40921 - protein, 120 aa, Artificial Sequence
  Chemically Synthesized
QVQLQESGGGLVQAGGSLRLSCAASGYIFAYVSMGWYRQAPGKEREFVASIADGSITYYADSVKGRFTISRDNAKNTVYLQMNSLKPEDTAVYYCAAGIYLGRPPGDAYWGQGTQVTVSS

SEQ ID NO: 40922 - protein, 118 aa, Artificial Sequence
  Chemically Synthesized
QVQLQESGGGLVQAGGSLRLSCAASGSIFLSVIMGWYRQAPGKEREFVATIDRGGNTNYADSVKGRFTISRDNAKNTVYLQMNSLKPEDTAVYYCAVDPYQYYYLQYWGQGTQVTVSS

SEQ ID NO: 40923 - protein, 117 aa, Artificial Sequence
  Chemically Synthesized
QVQLQESGGGLVQAGGSLRLSCAASGTFLFVVMGWYRQAPGKEREFVATIDGGTSTNYADSVKGRFTISRDNAKNTVYLQMNSLKPEDTAVYYCAVRLRVAWQLAYWGQGTQVTVSS

SEQ ID NO: 40924 - protein, 117 aa, Artificial Sequence
  Chemically Synthesized
QVQLQESGGGLVQAGGSLRLSCAASGNISDNRLMGWYRQAPGKEREFVASISYGAITNYADSVKGRFTISRDNAKNTVYLQMNSLKPEDTAVYYCAVYAYYRYYLYWGQGTQVTVSS

SEQ ID NO: 40925 - protein, 122 aa, Artificial Sequence
  Chemically Synthesized
QVQLQESGGGLVQAGGSLRLSCAASGTISAQVVMGWYRQAPGKERELVAAIDYGGNTYYADSVKGRFTISRDNAKNTVYLQMNSLKPEDTAVYYCAVPLGRGTYDAPYFQYWGQGTQVTVSS

SEQ ID NO: 40926 - protein, 121 aa, Artificial Sequence
  Chemically Synthesized
QVQLQESGGGLVQAGGSLRLSCAASGNISDIDMGWYRQAPGKEREFVAGITNGGTTNYADSVKGRFTISRDNAKNTVYLQMNSLKPEDTAVYYCAAAGYDWYKLQDLFSYWGQGTQVTVSS

SEQ ID NO: 40927 - protein, 118 aa, Artificial Sequence
  Chemically Synthesized
QVQLQESGGGLVQAGGSLRLSCAASGTIFHAVVMGWYRQAPGKERELVATISDGSNTNYADSVKGRFTISRDNAKNTVYLQMNSLKPEDTAVYYCAAYDRYWQSLSYWGQGTQVTVSS

SEQ ID NO: 40928 - protein, 121 aa, Artificial Sequence
  Chemically Synthesized
QVQLQESGGGLVQAGGSLRLSCAASGNISPGGFMGWYRQAPGKEREFVAGISWGGSTYYADSVKGRFTISRDNAKNTVYLQMNSLKPEDTAVYYCAVSVVRLLSGLSTLYWGQGTQVTVSS

SEQ ID NO: 40929 - protein, 122 aa, Artificial Sequence
  Chemically Synthesized
QVQLQESGGGLVQAGGSLRLSCAASGTIFTYSPMGWYRQAPGKEREFVAAITYGTITYYADSVKGRFTISRDNAKNTVYLQMNSLKPEDTAVYYCAVAPYSYSRYQRTHPYWGQGTQVTVSS

SEQ ID NO: 40930 - protein, 122 aa, Artificial Sequence
  Chemically Synthesized
QVQLQESGGGLVQAGGSLRLSCAASGTISYREDMGWYRQAPGKERELVATIGYGGNTNYADSVKGRFTISRDNAKNTVYLQMNSLKPEDTAVYYCAVDTPYSQTYPLLLTYWGQGTQVTVSS

SEQ ID NO: 40931 - protein, 126 aa, Artificial Sequence
  Chemically Synthesized
QVQLQESGGGLVQAGGSLRLSCAASGNISVYYIMGWYRQAPGKERELVASISDGASTNYADSVKGRFTISRDNAKNTVYLQMNSLKPEDTAVYYCAVYYRDLYDDARRYEYRHLYWGQGTQVTVSS

SEQ ID NO: 40932 - protein, 118 aa, Artificial Sequence
  Chemically Synthesized
QVQLQESGGGLVQAGGSLRLSCAASGTIFYDGYMGWYRQAPGKERELVAAITFGAITYYADSVKGRFTISRDNAKNTVYLQMNSLKPEDTAVYYCAVPQGFQTFYRYWGQGTQVTVSS

SEQ ID NO: 40933 - protein, 118 aa, Artificial Sequence
  Chemically Synthesized
QVQLQESGGGLVQAGGSLRLSCAASGTIFGSWYMGWYRQAPGKERELVATITLGSSTYYADSVKGRFTISRDNAKNTVYLQMNSLKPEDTAVYYCAVWSLETYRHGYWGQGTQVTVSS

SEQ ID NO: 40934 - protein, 118 aa, Artificial Sequence
  Chemically Synthesized
QVQLQESGGGLVQAGGSLRLSCAASGTISFWTRMGWYRQAPGKERELVATISSGAITNYADSVKGRFTISRDNAKNTVYLQMNSLKPEDTAVYYCAVRKPASGNHDYWGQGTQVTVSS

SEQ ID NO: 40935 - protein, 122 aa, Artificial Sequence
  Chemically Synthesized
QVQLQESGGGLVQAGGSLRLSCAASGTISGYYDMGWYRQAPGKEREFVASIAVGASTNYADSVKGRFTISRDNAKNTVYLQMNSLKPEDTAVYYCAVTFSTDWFTPDTHTYWGQGTQVTVSS

SEQ ID NO: 40936 - protein, 121 aa, Artificial Sequence
  Chemically Synthesized
QVQLQESGGGLVQAGGSLRLSCAASGYISAADYMGWYRQAPGKERELVAGITDGANTYYADSVKGRFTISRDNAKNTVYLQMNSLKPEDTAVYYCAADTTNSTRSLTLIYWGQGTQVTVSS

SEQ ID NO: 40937 - protein, 122 aa, Artificial Sequence
  Chemically Synthesized
QVQLQESGGGLVQAGGSLRLSCAASGTIFNYEGMGWYRQAPGKEREFVASIDYGATTNYADSVKGRFTISRDNAKNTVYLQMNSLKPEDTAVYYCAVQWRINWRADGDLDYWGQGTQVTVSS

SEQ ID NO: 40938 - protein, 118 aa, Artificial Sequence
  Chemically Synthesized
QVQLQESGGGLVQAGGSLRLSCAASGYISPTDLMGWYRQAPGKERELVASISTGTTTNYADSVKGRFTISRDNAKNTVYLQMNSLKPEDTAVYYCAAQTYYVPDYSYWGQGTQVTVSS

SEQ ID NO: 40939 - protein, 122 aa, Artificial Sequence
  Chemically Synthesized
QVQLQESGGGLVQAGGSLRLSCAASGTIFLYVLMGWYRQAPGKEREFVASITKGTNTYYADSVKGRFTISRDNAKNTVYLQMNSLKPEDTAVYYCAARPDTRLWGYTRYTYWGQGTQVTVSS

SEQ ID NO: 40940 - protein, 122 aa, Artificial Sequence
  Chemically Synthesized
QVQLQESGGGLVQAGGSLRLSCAASGNISQPLYMGWYRQAPGKEREFVATIDDGGSTNYADSVKGRFTISRDNAKNTVYLQMNSLKPEDTAVYYCAVPYQGYYQYPYLFAYWGQGTQVTVSS

SEQ ID NO: 40941 - protein, 117 aa, Artificial Sequence
  Chemically Synthesized
QVQLQESGGGLVQAGGSLRLSCAASGNISYSNDMGWYRQAPGKERELVASISNGGTTYYADSVKGRFTISRDNAKNTVYLQMNSLKPEDTAVYYCAVTTTTSTTMYWGQGTQVTVSS

SEQ ID NO: 40942 - protein, 126 aa, Artificial Sequence
  Chemically Synthesized
QVQLQESGGGLVQAGGSLRLSCAASGSIFWRRLMGWYRQAPGKERELVAAIDYGSSTNYADSVKGRFTISRDNAKNTVYLQMNSLKPEDTAVYYCAVYPGDVDDPDQVVDREHYYWGQGTQVTVSS

SEQ ID NO: 40943 - protein, 126 aa, Artificial Sequence
  Chemically Synthesized
QVQLQESGGGLVQAGGSLRLSCAASGNISIPWYMGWYRQAPGKEREFVAAITLGGSTYYADSVKGRFTISRDNAKNTVYLQMNSLKPEDTAVYYCAVRNPRPRYDYSWYRGALPYWGQGTQVTVSS

SEQ ID NO: 40944 - protein, 122 aa, Artificial Sequence
  Chemically Synthesized
QVQLQESGGGLVQAGGSLRLSCAASGYIFVTDTMGWYRQAPGKEREFVASIGTGAITYYADSVKGRFTISRDNAKNTVYLQMNSLKPEDTAVYYCAVGYGHYLPSYARYGYWGQGTQVTVSS

SEQ ID NO: 40945 - protein, 117 aa, Artificial Sequence
  Chemically Synthesized
QVQLQESGGGLVQAGGSLRLSCAASGNIFWYIVMGWYRQAPGKEREFVATGGGSTTYYADSVKGRFTISRDNAKNTVYLQMNSLKPEDTAVYYCAAYDYFEYGHVYWGQGTQVTVSS

SEQ ID NO: 40946 - protein, 122 aa, Artificial Sequence
  Chemically Synthesized
QVQLQESGGGLVQAGGSLRLSCAASGTIFFYDYMGWYRQAPGKERELVATISVGTITYYADSVKGRFTISRDNAKNTVYLQMNSLKPEDTAVYYCAAAWWGGEVNVIRHAYWGQGTQVTVSS

SEQ ID NO: 40947 - protein, 118 aa, Artificial Sequence
  Chemically Synthesized
QVQLQESGGGLVQAGGSLRLSCAASGNISSFSLMGWYRQAPGKERELVATIDTGTTTYYADSVKGRFTISRDNAKNTVYLQMNSLKPEDTAVYYCAADRGDLYLHNYWGQGTQVTVSS

SEQ ID NO: 40948 - protein, 117 aa, Artificial Sequence
  Chemically Synthesized
QVQLQESGGGLVQAGGSLRLSCAASGNISHINAMGWYRQAPGKERELVAGIVLVVLPYADSVKGRFTISRDNAKNTVYLQMNSLKPEDTAVYYCAVRPYHAYSHPYWGQGTQVTVSS

SEQ ID NO: 40949 - protein, 122 aa, Artificial Sequence
  Chemically Synthesized
QVQLQESGGGLVQAGGSLRLSCAASGNISDYFIMGWYRQAPGKERELVAGITQGATTYYADSVKGRFTISRDNAKNTVYLQMNSLKPEDTAVYYCAVFPRYNEYTYVVHRYWGQGTQVTVSS

SEQ ID NO: 40950 - protein, 116 aa, Artificial Sequence
  Chemically Synthesized
QVQLQESGGGLVQAGGSLRLSCAASGNISSAQYMGWYRQAPGKERELVPVLVLVLLPYADSVKGRFTISRDNAKNTVYLQMNSLKPEDTAVYYCAAGTPNHQSFYWGQGTQVTVSS

SEQ ID NO: 40951 - protein, 117 aa, Artificial Sequence
  Chemically Synthesized
QVQLQESGGGLVQAGGSLRLSCAASGNISERGTMGWYRQAPGKERELVATIGLGTTTNYADSVKGRFTISRDNAKNTVYLQMNSLKPEDTAVYYCAVYVSTLNLMYWGQGTQVTVSS

SEQ ID NO: 40952 - protein, 117 aa, Artificial Sequence
  Chemically Synthesized
QVQLQESGGGLVQAGGSLRLSCAASGSIFLTTMGWYRQAPGKERELVATIGYGAITNYADSVKGRFTISRDNAKNTVYLQMNSLKPEDTAVYYCAATNGYTYIYPYWGQGTQVTVSS

SEQ ID NO: 40953 - protein, 122 aa, Artificial Sequence
  Chemically Synthesized
QVQLQESGGGLVQAGGSLRLSCAASGNISGRAYMGWYRQAPGKEREFVAGIAYGSITNYADSVKGRFTISRDNAKNTVYLQMNSLKPEDTAVYYCAVYEFHPDFGNTYYAYWGQGTQVTVSS

SEQ ID NO: 40954 - protein, 125 aa, Artificial Sequence
  Chemically Synthesized
QVQLQESGGGLVQAGGSLRLSCAASGNIFEYDYMGWYRQAPGKERELLPLLVTVLVPYADSVKGRFTISRDNAKNTVYLQMNSLKPEDTAVYYCAAGQIGSDLQNRWYRRAHDYWGQGTQVTVSS

SEQ ID NO: 40955 - protein, 114 aa, Artificial Sequence
  Chemically Synthesized
QVQLQESGGGLVQAGGSLRLSCAASGTIFDYYPMGWYRQAPGKERELVAGIAYGSTTNYADSVKGRFTISRDNAKNTVYLQMNSLKPEDTAVYYCAVLKLLTYWGQGTQVTVSS

SEQ ID NO: 40956 - protein, 119 aa, Artificial Sequence
  Chemically Synthesized
QVQLQESGGGLVQAGGSLRLSCAASGNIFDDGQMGWYRQAPGKEREFGGNTNYADSVKGRFTISRDNAKNTVYLQMNSLKPEDTAVYYCATADYYIYAVPARSYQLIYWGQGTQVTVSS

SEQ ID NO: 40957 - protein, 122 aa, Artificial Sequence
  Chemically Synthesized
QVQLQESGGGLVQAGGSLRLSCAASGSISADSDMGWYRQAPGKERELVAGITYGTYYLYADSVKGRFTISRDNAKNTVYLQMNSLKPEDTAVYYCAAYYHDGVGYGYYFYYWGQGTQVTVSS

SEQ ID NO: 40958 - protein, 111 aa, Artificial Sequence
  Chemically Synthesized
QVQLQESGGGLVQAGGSLRLSCAASGTISRWGDMGWYRQAPGKERELVATIGSGSITYYADSVKGRFTISRDNAKNTVYLQMNSLKPEDTAVYYCADLFYWGQGTQVTVSS

SEQ ID NO: 40959 - protein, 121 aa, Artificial Sequence
  Chemically Synthesized
QVQLQESGGGLVQAGGSLRLSCAASGYIFVHRYMGWYRQAPGKERELCCRYWSGCYYQYADSVKGRFTISRDNAKNTVYLQMNSLKPEDTAVYYCAASTHQKVGSYPYPYWGQGTQVTVSS

SEQ ID NO: 40960 - protein, 122 aa, Artificial Sequence
  Chemically Synthesized
QVQLQESGGGLVQAGGSLRLSCAASGSISYDTWMGWYRQAPGKEREFVAAITIGGSTNYADSVKGRFTISRDNAKNTVYLQMNSLKPEDTAVYYCAVYPAVALNALPPYAYWGQGTQVTVSS

SEQ ID NO: 40961 - protein, 122 aa, Artificial Sequence
  Chemically Synthesized
QVQLQESGGGLVQAGGSLRLSCAASGNISGGYYMGWYRQAPGKEREFVATIGVGTSTNYADSVKGRFTISRDNAKNTVYLQMNSLKPEDTAVYYCAATYDYDPDYRPEHHYWGQGTQVTVSS

SEQ ID NO: 40962 - protein, 118 aa, Artificial Sequence
  Chemically Synthesized
QVQLQESGGGLVQAGGSLRLSCAASGTISPIDIMGWYRQAPGKERELVATINRGGNTYYADSVKGRFTISRDNAKNTVYLQMNSLKPEDTAVYYCAVGIWYDQWYNYWGQGTQVTVSS

SEQ ID NO: 40963 - protein, 118 aa, Artificial Sequence
  Chemically Synthesized
QVQLQESGGGLVQAGGSLRLSCAASGSISRSAYMGWYRQAPGKERELVAAIAVGGNTYYADSVKGRFTISRDNAKNTVYLQMNSLKPEDTAVYYCAAFSYYDQQYAYWGQGTQVTVSS

SEQ ID NO: 40964 - protein, 113 aa, Artificial Sequence
  Chemically Synthesized
QVQLQESGGGLVQAGGSLRLSCAASGNISYTTAMGWYRQAPGKEREFVATINYGTTTYYADSVKGRFTISRDNAKNTVYLQMNSLKPEDTAVYYCAVDGVTYWGQGTQVTVSS

SEQ ID NO: 40965 - protein, 118 aa, Artificial Sequence
  Chemically Synthesized
QVQLQESGGGLVQAGGSLRLSCAASGTISFAAYMGWYRQAPGKERELVAAIAPGANTNYADSVKGRFTISRDNAKNTVYLQMNSLKPEDTAVYYCAVDPVEHDDYDYWGQGTQVTVSS

SEQ ID NO: 40966 - protein, 121 aa, Artificial Sequence
  Chemically Synthesized
QVQLQESGGGLVQAGGSLRLSCAASGTISARAYMGWYRQAPGKERELVAAIGGGGNTYYADSVKGRFTISRDNAKNTVYLQMNSLKPEDTAVYYCAVASCSVNRLTTFMYWGQGTQVTVSS

SEQ ID NO: 40967 - protein, 122 aa, Artificial Sequence
  Chemically Synthesized
QVQLQESGGGLVQAGGSLRLSCAASGNISYYYRMGWYRQAPGKEREFVASIGRGTNTYYADSVKGRFTISRDNAKNTVYLQMNSLKPEDTAVYYCAAYRNYHSHFRYQHRYWGQGTQVTVSS

SEQ ID NO: 40968 - protein, 122 aa, Artificial Sequence
  Chemically Synthesized
QVQLQESGGGLVQAGGSLRLSCAASGTISWGTRMGWYRQAPGKEREFVAAIGDGGNTYYADSVKGRFTISRDNAKNTVYLQMNSLKPEDTAVYYCAAYRYEYYGYDDQVLYWGQGTQVTVSS

SEQ ID NO: 40969 - protein, 118 aa, Artificial Sequence
  Chemically Synthesized
QVQLQESGGGLVQAGGSLRLSCAASGSISDRSGMGWYRQAPGKEREFVAAITRGATTNYADSVKGRFTISRDNAKNTVYLQMNSLKPEDTAVYYCAVFSQASPGLGYWGQGTQVTVSS

SEQ ID NO: 40970 - protein, 117 aa, Artificial Sequence
  Chemically Synthesized
QVQLQESGGGLVQAGGSLRLSCAASGNISYPVDMGWYRQAPGKEREFVATIGDGGTTYYADSVKGRFTISRDNAKNTVYLQMNSLKPEDTAVYYCAVYDHEPAVIYWGQGTQVTVSS

SEQ ID NO: 40971 - protein, 117 aa, Artificial Sequence
  Chemically Synthesized
QVQLQESGGGLVQAGGSLRLSCAASGSISTLTMGWYRQAPGKEREFVAAIGDGGNTNYADSVKGRFTISRDNAKNTVYLQMNSLKPEDTAVYYCAAAGYYVWLYAYWGQGTQVTVSS

SEQ ID NO: 40972 - protein, 117 aa, Artificial Sequence
  Chemically Synthesized
QVQLQESGGGLVQAGGSLRLSCAASGSIFAIPEMGWYRQAPGKEREFVAAIGSVLVPYADSVKGRFTISRDNAKNTVYLQMNSLKPEDTAVYYCAVYSDDANGLFYWGQGTQVTVSS

SEQ ID NO: 40973 - protein, 117 aa, Artificial Sequence
  Chemically Synthesized
QVQLQESGGGLVQAGGSLRLSCAASGTISLQDEMGWYRQAPGKERELVASINVGAITNYADSVKGRFTISRDNAKNTVYLQMNSLKPEDTAVYYCAVDLDEPVHSYWGQGTQVTVSS

SEQ ID NO: 40974 - protein, 121 aa, Artificial Sequence
  Chemically Synthesized
QVQLQESGGGLVQAGGSLRLSCAASGSIFRADLMGWYRQAPGKERELVASISYGANTYYADSVKGRFTISRDNAKNTVYLQMNSLKPEDTAVYYCAARITLTDIDLESFYWGQGTQVTVSS

SEQ ID NO: 40975 - protein, 118 aa, Artificial Sequence
  Chemically Synthesized
QVQLQESGGGLVQAGGSLRLSCAASGYISSPRPMGWYRQAPGKEREFVATIGYGGTTNYADSVKGRFTISRDNAKNTVYLQMNSLKPEDTAVYYCAVLSWYRTGHRYWGQGTQVTVSS

SEQ ID NO: 40976 - protein, 118 aa, Artificial Sequence
  Chemically Synthesized
QVQLQESGGGLVQAGGSLRLSCAASGSISGGYYMGWYRQAPGKEREFVATINYGSSTNYADSVKGRFTISRDNAKNTVYLQMNSLKPEDTAVYYCAVRRTEAYRYGYWGQGTQVTVSS

SEQ ID NO: 40977 - protein, 126 aa, Artificial Sequence
  Chemically Synthesized
QVQLQESGGGLVQAGGSLRLSCAASGYISVVYIMGWYRQAPGKEREFVASIAYGGNTNYADSVKGRFTISRDNAKNTVYLQMNSLKPEDTAVYYCAVLGDAYSLFTSLDYGYLDYWGQGTQVTVSS

SEQ ID NO: 40978 - protein, 118 aa, Artificial Sequence
  Chemically Synthesized
QVQLQESGGGLVQAGGSLRLSCAASGSIFNTSGMGWYRQAPGKERELVATIGRGASTYYADSVKGRFTISRDNAKNTVYLQMNSLKPEDTAVYYCAAPLPYSLDFGYWGQGTQVTVSS

SEQ ID NO: 40979 - protein, 126 aa, Artificial Sequence
  Chemically Synthesized
QVQLQESGGGLVQAGGSLRLSCAASGYISVHSFMGWYRQAPGKEREFVAGISAGGITNYADSVKGRFTISRDNAKNTVYLQMNSLKPEDTAVYYCAVDVVFWTITAWYWWEYLGYWGQGTQVTVSS

SEQ ID NO: 40980 - protein, 121 aa, Artificial Sequence
  Chemically Synthesized
QVQLQESGGGLVQAGGSLRLSCAASGNIFEGDAMGWYRQAPGKEREFVAGIDYGTTTYADSVKGRFTISRDNAKNTVYLQMNSLKPEDTAVYYCAVWSDRVHAGLVPFDYWGQGTQVTVSS

SEQ ID NO: 40981 - protein, 118 aa, Artificial Sequence
  Chemically Synthesized
QVQLQESGGGLVQAGGSLRLSCAASGNISSFGYMGWYRQAPGKEREFVAAINRGGSTYYADSVKGRFTISRDNAKNTVYLQMNSLKPEDTAVYYCAALYRHRDRYVYWGQGTQVTVSS

SEQ ID NO: 40982 - protein, 118 aa, Artificial Sequence
  Chemically Synthesized
QVQLQESGGGLVQAGGSLRLSCAASGNISGLIAMGWYRQAPGKEREFVATIAFGGSTYYADSVKGRFTISRDNAKNTVYLQMNSLKPEDTAVYYCAVGPVGYEVLAYWGQGTQVTVSS

SEQ ID NO: 40983 - protein, 118 aa, Artificial Sequence
  Chemically Synthesized
QVQLQESGGGLVQAGGSLRLSCAASGSIFSRLWMGWYRQAPGKERELVAGIAYGGTTNYADSVKGRFTISRDNAKNTVYLQMNSLKPEDTAVYYCAVIRGFYSRFRYWGQGTQVTVSS

SEQ ID NO: 40984 - protein, 117 aa, Artificial Sequence
  Chemically Synthesized
QVQLQESGGGLVQAGGSLRLSCAASGNIFHVIYMGWYRQAPGKEREFVATISRGGTTNYADSVKGRFTISRDNAKNTVYLQMNSLKPEDTAVYYCAAGQPDSLVIYWGQGTQVTVSS

SEQ ID NO: 40985 - protein, 117 aa, Artificial Sequence
  Chemically Synthesized
QVQLQESGGGLVQAGGSLRLSCAASGNIFTFFYMGWYRQAPGKEREFVATISVGANTYYADSVKGRFTISRDNAKNTVYLQMNSLKPEDTAVYYCAVDYLGTDVHYWGQGTQVTVSS

SEQ ID NO: 40986 - protein, 122 aa, Artificial Sequence
  Chemically Synthesized
QVQLQESGGGLVQAGGSLRLSCAASGNIFPAAIMGWYRQAPGKERELVATITEGANTYYADSVKGRFTISRDNAKNTVYLQMNSLKPEDTAVYYCAAVSHYVDDRGYRLWYWGQGTQVTVSS

SEQ ID NO: 40987 - protein, 122 aa, Artificial Sequence
  Chemically Synthesized
QVQLQESGGGLVQAGGSLRLSCAASGNIFYYVAMGWYRQAPGKERELVAGISSGSITNYADSVKGRFTISRDNAKNTVYLQMNSLKPEDTAVYYCAVRRWPYPSWYTGFSYWGQGTQVTVSS

SEQ ID NO: 40988 - protein, 117 aa, Artificial Sequence
  Chemically Synthesized
QVQLQESGGGLVQAGGSLRLSCAASGTIFPSSFMGWYRQAPGKEREFVATIGIGTTTNYADSVKGRFTISRDNAKNTVYLQMNSLKPEDTAVYYCAVYRHEIRFGYWGQGTQVTVSS

SEQ ID NO: 40989 - protein, 118 aa, Artificial Sequence
  Chemically Synthesized
QVQLQESGGGLVQAGGSLRLSCAASGTIFRWRTMGWYRQAPGKERELVAAIAFGGNTYYADSVKGRFTISRDNAKNTVYLQMNSLKPEDTAVYYCAVYYGWRAIHIYWGQGTQVTVSS

SEQ ID NO: 40990 - protein, 118 aa, Artificial Sequence
  Chemically Synthesized
QVQLQESGGGLVQAGGSLRLSCAASGTISQPRIMGWYRQAPGKERELVAAINGGATTNYADSVKGRFTISRDNAKNTVYLQMNSLKPEDTAVYYCAARQYITYIYSYWGQGTQVTVSS

SEQ ID NO: 40991 - protein, 118 aa, Artificial Sequence
  Chemically Synthesized
QVQLQESGGGLVQAGGSLRLSCAASGTIFGRPAMGWYRQAPGKEREFVAAINRGSITYYADSVKGRFTISRDNAKNTVYLQMNSLKPEDTAVYYCAVYSRYKGRFAYWGQGTQVTVSS

SEQ ID NO: 40992 - protein, 118 aa, Artificial Sequence
  Chemically Synthesized
QVQLQESGGGLVQAGGSLRLSCAASGNISVHLFMGWYRQAPGKEREFVATITAGSITYYADSVKGRFTISRDNAKNTVYLQMNSLKPEDTAVYYCAVQPWLFYVFAYWGQGTQVTVSS

SEQ ID NO: 40993 - protein, 122 aa, Artificial Sequence
  Chemically Synthesized
QVQLQESGGGLVQAGGSLRLSCAASGYISWDGSMGWYRQAPGKEREFVASIAIGGNTNYADSVKGRFTISRDNAKNTVYLQMNSLKPEDTAVYYCAAINVGDYAGERHYYYWGQGTQVTVSS

SEQ ID NO: 40994 - protein, 126 aa, Artificial Sequence
  Chemically Synthesized
QVQLQESGGGLVQAGGSLRLSCAASGTIFAYYIMGWYRQAPGKERELVATIAAGGNTNYADSVKGRFTISRDNAKNTVYLQMNSLKPEDTAVYYCAVGNGWDVRQRWWYEYWFYYWGQGTQVTVSS

SEQ ID NO: 40995 - protein, 118 aa, Artificial Sequence
  Chemically Synthesized
QVQLQESGGGLVQAGGSLRLSCAASGTIFGPFYMGWYRQAPGKERELVATISTGASTYYADSVKGRFTISRDNAKNTVYLQMNSLKPEDTAVYYCAVWVLRIVVHPYWGQGTQVTVSS

SEQ ID NO: 40996 - protein, 126 aa, Artificial Sequence
  Chemically Synthesized
QVQLQESGGGLVQAGGSLRLSCAASGTIFYADYMGWYRQAPGKERELVAGIDHGSNTNYADSVKGRFTISRDNAKNTVYLQMNSLKPEDTAVYYCAVYDQDYGSPPRGVPIALQYWGQGTQVTVSS

SEQ ID NO: 40997 - protein, 118 aa, Artificial Sequence
  Chemically Synthesized
QVQLQESGGGLVQAGGSLRLSCAASGNIFYSRHMGWYRQAPGKEREFVATITSGGTTYYADSVKGRFTISRDNAKNTVYLQMNSLKPEDTAVYYCAAYRPYLFYHRYWGQGTQVTVSS

SEQ ID NO: 40998 - protein, 118 aa, Artificial Sequence
  Chemically Synthesized
QVQLQESGGGLVQAGGSLRLSCAASGTISPAGTMGWYRQAPGKERELVATIANGGTTNYADSVKGRFTISRDNAKNTVYLQMNSLKPEDTAVYYCAADIDHYGSHYYWGQGTQVTVSS

SEQ ID NO: 40999 - protein, 117 aa, Artificial Sequence
  Chemically Synthesized
QVQLQESGGGLVQAGGSLRLSCAASGTIFRYFWMGWYRQAPGKEREFVAAITWGILPYADSVKGRFTISRDNAKNTVYLQMNSLKPEDTAVYYCAVGTIAFAYYGYWGQGTQVTVSS

SEQ ID NO: 41000 - protein, 118 aa, Artificial Sequence
  Chemically Synthesized
QVQLQESGGGLVQAGGSLRLSCAASGYIFYPYVMGWYRQAPGKERELVAGIAPGGNTNYADSVKGRFTISRDNAKNTVYLQMNSLKPEDTAVYYCAVPSGPEYGHYYWGQGTQVTVSS

SEQ ID NO: 41001 - protein, 125 aa, Artificial Sequence
  Chemically Synthesized
QVQLQESGGGLVQAGGSLRLSCAASGSISASYNMGWYRQAPGKERELVAAINPGSNTYYADSVKGRFTISRDNAKNTVYLQMNSLKPEDTAVYYCAVRLAAEFPKSHRSNRLLYWGQGTQVTVSS

SEQ ID NO: 41002 - protein, 117 aa, Artificial Sequence
  Chemically Synthesized
QVQLQESGGGLVQAGGSLRLSCAASGTISVLTTMGWYRQAPGKEREFVATINPGTTTNYADSVKGRFTISRDNAKNTVYLQMNSLKPEDTAVYYCAVGFGVLPGWYWGQGTQVTVSS

SEQ ID NO: 41003 - protein, 121 aa, Artificial Sequence
  Chemically Synthesized
QVQLQESGGGLVQAGGSLRLSCAASGTISRDDYMGWYRQAPGKERELVAAIGYGTTTYYADSVKGRFTISRDNAKNTVYLQMNSLKPEDTAVYYCAADETFGSDRYWLVYWGQGTQVTVSS

SEQ ID NO: 41004 - protein, 118 aa, Artificial Sequence
  Chemically Synthesized
QVQLQESGGGLVQAGGSLRLSCAASGTISYPYYMGWYRQAPGKERELVASIADGATTYYADSVKGRFTISRDNAKNTVYLQMNSLKPEDTAVYYCAVLYADRTVLLYWGQGTQVTVSS

SEQ ID NO: 41005 - protein, 121 aa, Artificial Sequence
  Chemically Synthesized
QVQLQESGGGLVQAGGSLRLSCAASGNISDYKMGWYRQAPGKERELVAGITSGGTTNYADSVKGRFTISRDNAKNTVYLQMNSLKPEDTAVYYCAAYFGEATYAYSSHEYWGQGTQVTVSS

SEQ ID NO: 41006 - protein, 116 aa, Artificial Sequence
  Chemically Synthesized
QVQLQESGGGLVQAGGSLRLSCAASGNISGRVRMGWYRQAPGKERELVASIANGASTYYADSVKGRFTISRDNAKNTVYLQMNSLKPEDTAVYYCAAGLGEDLYYWGQGTQVTVSS

SEQ ID NO: 41007 - protein, 115 aa, Artificial Sequence
  Chemically Synthesized
QVQLQESGGGLVQAGGSLRLSCAASGYIFSYTAMGWYRQAPGKERELVAGINPGAITYYADSVKGRFTISRDNAKNTVYLQMNSLKPEDTAVYYCAAYGSAHNYWGQGTQVTVSS

SEQ ID NO: 41008 - protein, 118 aa, Artificial Sequence
  Chemically Synthesized
QVQLQESGGGLVQAGGSLRLSCAASGNIFSTLMGWYRQAPGKERELVAGINHGANTNYADSVKGRFTISRDNAKNTVYLQMNSLKPEDTAVYYCAVPATYDRSHLAYWGQGTQVTVSS

SEQ ID NO: 41009 - protein, 118 aa, Artificial Sequence
  Chemically Synthesized
QVQLQESGGGLVQAGGSLRLSCAASGSIFERTAMGWYRQAPGKERELVASISYGGNTYYADSVKGRFTISRDNAKNTVYLQMNSLKPEDTAVYYCAVYGVAVAGFTYWGQGTQVTVSS

SEQ ID NO: 41010 - protein, 118 aa, Artificial Sequence
  Chemically Synthesized
QVQLQESGGGLVQAGGSLRLSCAASGYISLIAFMGWYRQAPGKERELVASIDYGGITYYADSVKGRFTISRDNAKNTVYLQMNSLKPEDTAVYYCAAYYPSYDSLYYWGQGTQVTVSS

SEQ ID NO: 41011 - protein, 122 aa, Artificial Sequence
  Chemically Synthesized
QVQLQESGGGLVQAGGSLRLSCAASGYISSGYLMGWYRQAPGKERELVAAISYGANTYYADSVKGRFTISRDNAKNTVYLQMNSLKPEDTAVYYCAAWDNGNYDDFDLFGYWGQGTQVTVSS

SEQ ID NO: 41012 - protein, 118 aa, Artificial Sequence
  Chemically Synthesized
QVQLQESGGGLVQAGGSLRLSCAASGNISFKTRMGWYRQAPGKERELVAAIGRGGNTNYADSVKGRFTISRDNAKNTVYLQMNSLKPEDTAVYYCAVVPLFSWRFTYWGQGTQVTVSS

SEQ ID NO: 41013 - protein, 118 aa, Artificial Sequence
  Chemically Synthesized
QVQLQESGGGLVQAGGSLRLSCAASGSIFPSDIMGWYRQAPGKERELVAAITLGSSTYYADSVKGRFTISRDNAKNTVYLQMNSLKPEDTAVYYCAAGYYRQAGYSYWGQGTQVTVSS

SEQ ID NO: 41014 - protein, 117 aa, Artificial Sequence
  Chemically Synthesized
QVQLQESGGGLVQAGGSLRLSCAASGYFSLRPMGWYRQAPGKERELVATINVGGTTYYADSVKGRFTISRDNAKNTVYLQMNSLKPEDTAVYYCAADKFTPGGFYYWGQGTQVTVSS

SEQ ID NO: 41015 - protein, 122 aa, Artificial Sequence
  Chemically Synthesized
QVQLQESGGGLVQAGGSLRLSCAASGTISYVRRMGWYRQAPGKERELVASIAAGGNTNYADSVKGRFTISRDNAKNTVYLQMNSLKPEDTAVYYCAVRRRAHYGGYFPHYYWGQGTQVTVSS

SEQ ID NO: 41016 - protein, 126 aa, Artificial Sequence
  Chemically Synthesized
QVQLQESGGGLVQAGGSLRLSCAASGNIFRISRMGWYRQAPGKERELVATIANGSITYYADSVKGRFTISRDNAKNTVYLQMNSLKPEDTAVYYCAVGVDAPIQWTGLDTYAHYYWGQGTQVTVSS

SEQ ID NO: 41017 - protein, 116 aa, Artificial Sequence
  Chemically Synthesized
QVQLQESGGGLVQAGGSLRLSCAASGTISRGDAMGWYRQAPGKERELVATIADGSSTNYADSVKGRFTISRDNAKNTVYLQMNSLKPEDTAVYYCAADLSSWLTYWGQGTQVTVSS

SEQ ID NO: 41018 - protein, 122 aa, Artificial Sequence
  Chemically Synthesized
QVQLQESGGGLVQAGGSLRLSCAASGNISAVVFMGWYRQAPGKERELVAGIADGGSTNYADSVKGRFTISRDNAKNTVYLQMNSLKPEDTAVYYCAVDVTSSVPVYYPHRYWGQGTQVTVSS

SEQ ID NO: 41019 - protein, 115 aa, Artificial Sequence
  Chemically Synthesized
QVQLQESGGGLVQAGGSLRLSCAASGSIFTYVIMGWYRQAPGKEREFVAAIGTGGTTNYADSVKGRFTISRDNAKNTVYLQMNSLKPEDTAVYYCAKLFSLYPYWGQGTQVTVSS

SEQ ID NO: 41020 - protein, 118 aa, Artificial Sequence
  Chemically Synthesized
QVQLQESGGGLVQAGGSLRLSCAASGSIFPEAYMGWYRQAPGKEREFVATITVGGITNYADSVKGRFTISRDNAKNTVYLQMNSLKPEDTAVYYCAAQFDDPTYFLYWGQGTQVTVSS

SEQ ID NO: 41021 - protein, 126 aa, Artificial Sequence
  Chemically Synthesized
QVQLQESGGGLVQAGGSLRLSCAASGNISTPGVMGWYRQAPGKERELVASITDGSSTNYADSVKGRFTISRDNAKNTVYLQMNSLKPEDTAVYYCAVEIGTYYASSYSIFLYLTYWGQGTQVTVSS

SEQ ID NO: 41022 - protein, 118 aa, Artificial Sequence
  Chemically Synthesized
QVQLQESGGGLVQAGGSLRLSCAASGSIFNSIYMGWYRQAPGKERELVAAINIGATTYYADSVKGRFTISRDNAKNTVYLQMNSLKPEDTAVYYCAVGSELQRILNYWGQGTQVTVSS

SEQ ID NO: 41023 - protein, 118 aa, Artificial Sequence
  Chemically Synthesized
QVQLQESGGGLVQAGGSLRLSCAASGNIFHPFTMGWYRQAPGKERELVAAISTGASTYYADSVKGRFTISRDNAKNTVYLQMNSLKPEDTAVYYCAAKAYRYRRFLYWGQGTQVTVSS

SEQ ID NO: 41024 - protein, 118 aa, Artificial Sequence
  Chemically Synthesized
QVQLQESGGGLVQAGGSLRLSCAASGTIFHFTVMGWYRQAPGKERELVATIAAGGITYYADSVKGRFTISRDNAKNTVYLQMNSLKPEDTAVYYCAVLDDPYGEHYYWGQGTQVTVSS

SEQ ID NO: 41025 - protein, 117 aa, Artificial Sequence
  Chemically Synthesized
QVQLQESGGGLVQAGGSLRLSCAASGYISTPDDMGWYRQAPGKERELVASIDTVVINYADSVKGRFTISRDNAKNTVYLQMNSLKPEDTAVYYCAAYLDIIPGHGYWGQGTQVTVSS

SEQ ID NO: 41026 - protein, 117 aa, Artificial Sequence
  Chemically Synthesized
QVQLQESGGGLVQAGGSLRLSCAASGYISYGWYMGWYRQAPGKEREFCCRYWCWGSTNYADSVKGRFTISRDNAKNTVYLQMNSLKPEDTAVYYCAADIDTSSFIYWGQGTQVTVSS

SEQ ID NO: 41027 - protein, 122 aa, Artificial Sequence
  Chemically Synthesized
QVQLQESGGGLVQAGGSLRLSCAASGTIFDGYIMGWYRQAPGKERELVATINDGGTTNYADSVKGRFTISRDNAKNTVYLQMNSLKPEDTAVYYCAVDVQLWPVYIVNHRYWGQGTQVTVSS

SEQ ID NO: 41028 - protein, 111 aa, Artificial Sequence
  Chemically Synthesized
QVQLQESGGGLVQAGGSLRLSCAASGTIFNRRDMGWYRQAPGKEREFVASIAIGGITNYADSVKGRFTISRDNAKNTVYLQMNSLKPEDTAVYYCAAYDYWGQGTQVTVSS

SEQ ID NO: 41029 - protein, 118 aa, Artificial Sequence
  Chemically Synthesized
QVQLQESGGGLVQAGGSLRLSCAASGTIFVYRDMGWYRQAPGKERELVASIGYGANTNYADSVKGRFTISRDNAKNTVYLQMNSLKPEDTAVYYCAARTRYRFYFGYWGQGTQVTVSS

SEQ ID NO: 41030 - protein, 121 aa, Artificial Sequence
  Chemically Synthesized
QVQLQESGGGLVQAGGSLRLSCAASGTISYVGVMGWYRQAPGKERELVATINYGTSTNYADSVKGRFTISRDNAKNTVYLQMNSLKPEDTAVYYCAVPYAPDSYVDVLPYWGQGTQVTVSS

SEQ ID NO: 41031 - protein, 126 aa, Artificial Sequence
  Chemically Synthesized
QVQLQESGGGLVQAGGSLRLSCAASGSISPIGIMGWYRQAPGKERELVAAIDWGSSTNYADSVKGRFTISRDNAKNTVYLQMNSLKPEDTAVYYCAANVGRIEDDYLRPDYDHEYWGQGTQVTVSS

SEQ ID NO: 41032 - protein, 118 aa, Artificial Sequence
  Chemically Synthesized
QVQLQESGGGLVQAGGSLRLSCAASGSISLRYGMGWYRQAPGKEREFVAGINYGTSTNYADSVKGRFTISRDNAKNTVYLQMNSLKPEDTAVYYCAANGGTYTTHTYWGQGTQVTVSS

SEQ ID NO: 41033 - protein, 118 aa, Artificial Sequence
  Chemically Synthesized
QVQLQESGGGLVQAGGSLRLSCAASGTIFADYYMGWYRQAPGKERELVAGIGAGSTTNYADSVKGRFTISRDNAKNTVYLQMNSLKPEDTAVYYCAVQGIDYYYYEYWGQGTQVTVSS

SEQ ID NO: 41034 - protein, 118 aa, Artificial Sequence
  Chemically Synthesized
QVQLQESGGGLVQAGGSLRLSCAASGNIFYLGVMGWYRQAPGKEREFVATISYGGNTNYADSVKGRFTISRDNAKNTVYLQMNSLKPEDTAVYYCAAITTAVRWFLYWGQGTQVTVSS

SEQ ID NO: 41035 - protein, 117 aa, Artificial Sequence
  Chemically Synthesized
QVQLQESGGGLVQAGGSLRLSCAASGNISVPTYMGWYRQAPGKEREFVAGIGHGSSTNYADSVKGRFTISRDNAKNTVYLQMNSLKPEDTAVYYCAAAYPPGMLIYWGQGTQVTVSS

SEQ ID NO: 41036 - protein, 121 aa, Artificial Sequence
  Chemically Synthesized
QVQLQESGGGLVQAGGSLRLSCAASGSISPRVLMGWYRQAPGKEREFVAAISDGANTNYADSVKGRFTISRDNAKNTVYLQMNSLKPEDTAVYYCAVVVGLLVLLFTGIYWGQGTQVTVSS

SEQ ID NO: 41037 - protein, 118 aa, Artificial Sequence
  Chemically Synthesized
QVQLQESGGGLVQAGGSLRLSCAASGTISVRTSMGWYRQAPGKERELVAAIAEGGNTYYADSVKGRFTISRDNAKNTVYLQMNSLKPEDTAVYYCAAPGDLRSYHSYWGQGTQVTVSS

SEQ ID NO: 41038 - protein, 117 aa, Artificial Sequence
  Chemically Synthesized
QVQLQESGGGLVQAGGSLRLSCAASGNISVSFMGWYRQAPGKERELVATISYGAITNYADSVKGRFTISRDNAKNTVYLQMNSLKPEDTAVYYCAATDARGYVHRYWGQGTQVTVSS

SEQ ID NO: 41039 - protein, 118 aa, Artificial Sequence
  Chemically Synthesized
QVQLQESGGGLVQAGGSLRLSCAASGTISPDRDMGWYRQAPGKEREFVASIADGSSTYYADSVKGRFTISRDNAKNTVYLQMNSLKPEDTAVYYCAAYWYEHRGYYYWGQGTQVTVSS

SEQ ID NO: 41040 - protein, 118 aa, Artificial Sequence
  Chemically Synthesized
QVQLQESGGGLVQAGGSLRLSCAASGYIFNRYRMGWYRQAPGKERELVATITYGGTTNYADSVKGRFTISRDNAKNTVYLQMNSLKPEDTAVYYCAAGRFLGHYLSYWGQGTQVTVSS

SEQ ID NO: 41041 - protein, 118 aa, Artificial Sequence
  Chemically Synthesized
QVQLQESGGGLVQAGGSLRLSCAASGNIFGTSDMGWYRQAPGKEREFVASIGYGGSTNYADSVKGRFTISRDNAKNTVYLQMNSLKPEDTAVYYCAVGQSYGTGHHYWGQGTQVTVSS

SEQ ID NO: 41042 - protein, 118 aa, Artificial Sequence
  Chemically Synthesized
QVQLQESGGGLVQAGGSLRLSCAASGSISYRRYMGWYRQAPGKEREFVAAIGRGATTYYADSVKGRFTISRDNAKNTVYLQMNSLKPEDTAVYYCAVYTLYQTRLRYWGQGTQVTVSS

SEQ ID NO: 41043 - protein, 114 aa, Artificial Sequence
  Chemically Synthesized
QVQLQESGGGLVQAGGSLRLSCAASGYIFYDEPMGWYRQAPGKERELVAGITPGGTTYYADSVKGRFTISRDNAKNTVYLQMNSLKPEDTAVYYCAAPRYHVYWGQGTQVTVSS

SEQ ID NO: 41044 - protein, 122 aa, Artificial Sequence
  Chemically Synthesized
QVQLQESGGGLVQAGGSLRLSCAASGSISWGYYMGWYRQAPGKERELVAAIAWGGITYYADSVKGRFTISRDNAKNTVYLQMNSLKPEDTAVYYCAAVGLRWRWDGADHAYWGQGTQVTVSS

SEQ ID NO: 41045 - protein, 122 aa, Artificial Sequence
  Chemically Synthesized
QVQLQESGGGLVQAGGSLRLSCAASGNIFTYYYMGWYRQAPGKEREFVAAISYGASTNYADSVKGRFTISRDNAKNTVYLQMNSLKPEDTAVYYCAVSGDVKIPGSYPYYYWGQGTQVTVSS

SEQ ID NO: 41046 - protein, 122 aa, Artificial Sequence
  Chemically Synthesized
QVQLQESGGGLVQAGGSLRLSCAASGYIFRPRYMGWYRQAPGKERELVASIAGGTNTNYADSVKGRFTISRDNAKNTVYLQMNSLKPEDTAVYYCAVPFWKRGATSFYHHYWGQGTQVTVSS

SEQ ID NO: 41047 - protein, 109 aa, Artificial Sequence
  Chemically Synthesized
QVQLQESGGGLVQAGGSLRLSCAASGSISSHDIMGWYRQAPGKERELVATITGGGTTYYADSVKGRFTISRDNAKNTVYLQMNSLKPEDTAVYYCAVYWGQGTQVTVSS

SEQ ID NO: 41048 - protein, 117 aa, Artificial Sequence
  Chemically Synthesized
QVQLQESGGGLVQAGGSLRLSCAASGYISRDVGMGWYRQAPGKEREFVATINSVVYLYADSVKGRFTISRDNAKNTVYLQMNSLKPEDTAVYYCAVEYDYTYPFSYWGQGTQVTVSS

SEQ ID NO: 41049 - protein, 118 aa, Artificial Sequence
  Chemically Synthesized
QVQLQESGGGLVQAGGSLRLSCAASGSIFRLRKMGWYRQAPGKEREFVAGIGIGGTTYYADSVKGRFTISRDNAKNTVYLQMNSLKPEDTAVYYCAARYLLYVVHQYWGQGTQVTVSS

SEQ ID NO: 41050 - protein, 118 aa, Artificial Sequence
  Chemically Synthesized
QVQLQESGGGLVQAGGSLRLSCAASGTISYFRIMGWYRQAPGKERELVATIASGATTNYADSVKGRFTISRDNAKNTVYLQMNSLKPEDTAVYYCAARYWKRWYHDYWGQGTQVTVSS

SEQ ID NO: 41051 - protein, 116 aa, Artificial Sequence
  Chemically Synthesized
QVQLQESGGGLVQAGGSLRLSCAASGTYVRVMGWYRQAPGKEREFVAGIGKGGITYYADSVKGRFTISRDNAKNTVYLQMNSLKPEDTAVYYCAVARSYLHRYRYWGQGTQVTVSS

SEQ ID NO: 41052 - protein, 118 aa, Artificial Sequence
  Chemically Synthesized
QVQLQESGGGLVQAGGSLRLSCAASGTIFHNVIMGWYRQAPGKERELVAAIGSGSTTNYADSVKGRFTISRDNAKNTVYLQMNSLKPEDTAVYYCAAPSGYVDYHTYWGQGTQVTVSS

SEQ ID NO: 41053 - protein, 123 aa, Artificial Sequence
  Chemically Synthesized
QVQLQESGGGLVQAGGSLRLSCAASGTISTAFLMGWYRQAPGKEREFVAAISGGTITNYADSVKGRFTISRDNAKNTVYLQMNSLKPEDTAVYYCAAREVATIANVPYLYYYWGQGTQVTVSS

SEQ ID NO: 41054 - protein, 122 aa, Artificial Sequence
  Chemically Synthesized
QVQLQESGGGLVQAGGSLRLSCAASGYISITRTMGWYRQAPGKEREFVASIALGTITYYADSVKGRFTISRDNAKNTVYLQMNSLKPEDTAVYYCAADNISTALYYRYLWYWGQGTQVTVSS

SEQ ID NO: 41055 - protein, 126 aa, Artificial Sequence
  Chemically Synthesized
QVQLQESGGGLVQAGGSLRLSCAASGSIFYRYAMGWYRQAPGKERELVATISSGATTYYADSVKGRFTISRDNAKNTVYLQMNSLKPEDTAVYYCAANIPANGRGYAVSRLDFYYWGQGTQVTVSS

SEQ ID NO: 41056 - protein, 118 aa, Artificial Sequence
  Chemically Synthesized
QVQLQESGGGLVQAGGSLRLSCAASGTIFVRHVMGWYRQAPGKERELVAGINRGTTTYYADSVKGRFTISRDNAKNTVYLQMNSLKPEDTAVYYCAVRYGYYHSHWYWGQGTQVTVSS

SEQ ID NO: 41057 - protein, 125 aa, Artificial Sequence
  Chemically Synthesized
QVQLQESGGGLVQAGGSLRLSCAASGSIFDYGMGWYRQAPGKEREFVASIGYGATTNYADSVKGRFTISRDNAKNTVYLQMNSLKPEDTAVYYCAVEVRGYPYYYYNKLGSHRYWGQGTQVTVSS

SEQ ID NO: 41058 - protein, 122 aa, Artificial Sequence
  Chemically Synthesized
QVQLQESGGGLVQAGGSLRLSCAASGYISTRGVMGWYRQAPGKEREFVAAINRGTNTYYADSVKGRFTISRDNAKNTVYLQMNSLKPEDTAVYYCAAQRTFQGYYRTYHDYWGQGTQVTVSS

SEQ ID NO: 41059 - protein, 126 aa, Artificial Sequence
  Chemically Synthesized
QVQLQESGGGLVQAGGSLRLSCAASGNISGPSDMGWYRQAPGKERELVASIADGANTNYADSVKGRFTISRDNAKNTVYLQMNSLKPEDTAVYYCAVDDDSRFTPYRRVWPYYYYWGQGTQVTVSS

SEQ ID NO: 41060 - protein, 118 aa, Artificial Sequence
  Chemically Synthesized
QVQLQESGGGLVQAGGSLRLSCAASGSISGTHSMGWYRQAPGKERELVASIAYGAITYYADSVKGRFTISRDNAKNTVYLQMNSLKPEDTAVYYCAANYYTRAYLSYWGQGTQVTVSS

SEQ ID NO: 41061 - protein, 118 aa, Artificial Sequence
  Chemically Synthesized
QVQLQESGGGLVQAGGSLRLSCAASGNISAWLPMGWYRQAPGKEREFVAGITSGGITNYADSVKGRFTISRDNAKNTVYLQMNSLKPEDTAVYYCAVRPRRFHAFRYWGQGTQVTVSS

SEQ ID NO: 41062 - protein, 118 aa, Artificial Sequence
  Chemically Synthesized
QVQLQESGGGLVQAGGSLRLSCAASGTIFSNFIMGWYRQAPGKEREFVAGINTGGNTNYADSVKGRFTISRDNAKNTVYLQMNSLKPEDTAVYYCAVIPDPSFALLYWGQGTQVTVSS

SEQ ID NO: 41063 - protein, 122 aa, Artificial Sequence
  Chemically Synthesized
QVQLQESGGGLVQAGGSLRLSCAASGNISLVERMGWYRQAPGKEREFVATIDRGGNTYYADSVKGRFTISRDNAKNTVYLQMNSLKPEDTAVYYCAVPYYYRKGYWRKLGYWGQGTQVTVSS

SEQ ID NO: 41064 - protein, 118 aa, Artificial Sequence
  Chemically Synthesized
QVQLQESGGGLVQAGGSLRLSCAASGTISRHVGMGWYRQAPGKERELVATITIGSSTYYADSVKGRFTISRDNAKNTVYLQMNSLKPEDTAVYYCAVDSYYYGLHVYWGQGTQVTVSS

SEQ ID NO: 41065 - protein, 118 aa, Artificial Sequence
  Chemically Synthesized
QVQLQESGGGLVQAGGSLRLSCAASGSIFRTRWMGWYRQAPGKERELVASITSGSNTYYADSVKGRFTISRDNAKNTVYLQMNSLKPEDTAVYYCAAGHKFFYRLGYWGQGTQVTVSS

SEQ ID NO: 41066 - protein, 122 aa, Artificial Sequence
  Chemically Synthesized
QVQLQESGGGLVQAGGSLRLSCAASGNISTGVYMGWYRQAPGKERELVASITDGATTYYADSVKGRFTISRDNAKNTVYLQMNSLKPEDTAVYYCAARYKYLVPVFYYYTYWGQGTQVTVSS

SEQ ID NO: 41067 - protein, 118 aa, Artificial Sequence
  Chemically Synthesized
QVQLQESGGGLVQAGGSLRLSCAASGTIFYFIFMGWYRQAPGKERELVATISAGANTYYADSVKGRFTISRDNAKNTVYLQMNSLKPEDTAVYYCAVYYFFGPYLVYWGQGTQVTVSS

SEQ ID NO: 41068 - protein, 123 aa, Artificial Sequence
  Chemically Synthesized
QVQLQESGGGLVQAGGSLRLSCAASGYIFYYDYMGWYRQAPGKERELVAAIGDGTNTNYADSVKGRFTISRDNAKNTVYLQMNSLKPEDTAVYYCAAEQKKFYERAPQKHGYWGQGTQVTVSS

SEQ ID NO: 41069 - protein, 117 aa, Artificial Sequence
  Chemically Synthesized
QVQLQESGGGLVQAGGSLRLSCAASGSIFRDQIMGWYRQAPGKEREFVATIASGASTNYADSVKGRFTISRDNAKNTVYLQMNSLKPEDTAVYYCAAYDSVRPAWYWGQGTQVTVSS

SEQ ID NO: 41070 - protein, 121 aa, Artificial Sequence
  Chemically Synthesized
QVQLQESGGGLVQAGGSLRLSCAASGTISHVLMGWYRQAPGKERELVAGIGDGANTNYADSVKGRFTISRDNAKNTVYLQMNSLKPEDTAVYYCAAEVYPNTYLISSFYYWGQGTQVTVSS

SEQ ID NO: 41071 - protein, 118 aa, Artificial Sequence
  Chemically Synthesized
QVQLQESGGGLVQAGGSLRLSCAASGSISVSYTMGWYRQAPGKEREFVAAIDDGGNTYYADSVKGRFTISRDNAKNTVYLQMNSLKPEDTAVYYCAVFGYLYRTHRYWGQGTQVTVSS

SEQ ID NO: 41072 - protein, 118 aa, Artificial Sequence
  Chemically Synthesized
QVQLQESGGGLVQAGGSLRLSCAASGNIFVHEDMGWYRQAPGKEREFVAAIASGATTNYADSVKGRFTISRDNAKNTVYLQMNSLKPEDTAVYYCAVSTVWYYPHYYWGQGTQVTVSS

SEQ ID NO: 41073 - protein, 120 aa, Artificial Sequence
  Chemically Synthesized
QVQLQESGGGLVQAGGSLRLSCAASGSISNLDTMGWYRQAPGKERELVAGIGSVVIPYADSVKGRFTISRDNAKNTVYLQMNSLKPEDTAVYYCAADYGEYYDYGDEHYWGQGTQVTVSS

SEQ ID NO: 41074 - protein, 122 aa, Artificial Sequence
  Chemically Synthesized
QVQLQESGGGLVQAGGSLRLSCAASGYIFRRTGMGWYRQAPGKEREFVASIGRGTSTNYADSVKGRFTISRDNAKNTVYLQMNSLKPEDTAVYYCAVWRYWQSYYWVYHDYWGQGTQVTVSS

SEQ ID NO: 41075 - protein, 126 aa, Artificial Sequence
  Chemically Synthesized
QVQLQESGGGLVQAGGSLRLSCAASGNIFLYDYMGWYRQAPGKERELVASIDYGTSTNYADSVKGRFTISRDNAKNTVYLQMNSLKPEDTAVYYCAVGESVGSVRHFAKSLQLSYWGQGTQVTVSS

SEQ ID NO: 41076 - protein, 117 aa, Artificial Sequence
  Chemically Synthesized
QVQLQESGGGLVQAGGSLRLSCAASGNILTRTMGWYRQAPGKEREFVAGISSGASTYYADSVKGRFTISRDNAKNTVYLQMNSLKPEDTAVYYCAAEYSVQATHDYWGQGTQVTVSS

SEQ ID NO: 41077 - protein, 122 aa, Artificial Sequence
  Chemically Synthesized
QVQLQESGGGLVQAGGSLRLSCAASGNISKTWAMGWYRQAPGKERELVATISRGSTTYYADSVKGRFTISRDNAKNTVYLQMNSLKPEDTAVYYCAVYLYSWRYPDHVHYYWGQGTQVTVSS

SEQ ID NO: 41078 - protein, 118 aa, Artificial Sequence
  Chemically Synthesized
QVQLQESGGGLVQAGGSLRLSCAASGTISSTAAMGWYRQAPGKEREFVATISAGGNTYYADSVKGRFTISRDNAKNTVYLQMNSLKPEDTAVYYCAVRIGLLHRLRYWGQGTQVTVSS

SEQ ID NO: 41079 - protein, 122 aa, Artificial Sequence
  Chemically Synthesized
QVQLQESGGGLVQAGGSLRLSCAASGTISRRISMGWYRQAPGKEREFVAGISPGGNTNYADSVKGRFTISRDNAKNTVYLQMNSLKPEDTAVYYCAVWGWRPWYLRYDHYYWGQGTQVTVSS

SEQ ID NO: 41080 - protein, 118 aa, Artificial Sequence
  Chemically Synthesized
QVQLQESGGGLVQAGGSLRLSCAASGTISLQNPMGWYRQAPGKERELVASIDSGATTYYADSVKGRFTISRDNAKNTVYLQMNSLKPEDTAVYYCAAHIYGSPYHYYWGQGTQVTVSS

SEQ ID NO: 41081 - protein, 126 aa, Artificial Sequence
  Chemically Synthesized
QVQLQESGGGLVQAGGSLRLSCAASGSIFYGRDMGWYRQAPGKEREFVATISYGASTNYADSVKGRFTISRDNAKNTVYLQMNSLKPEDTAVYYCAVYYTWLYWLYRHTYRLHPYWGQGTQVTVSS

SEQ ID NO: 41082 - protein, 117 aa, Artificial Sequence
  Chemically Synthesized
QVQLQESGGGLVQAGGSLRLSCAASGTIFLRTMGWYRQAPGKEREFVAGIAKGASTYYADSVKGRFTISRDNAKNTVYLQMNSLKPEDTAVYYCAADGDWYDHHYYWGQGTQVTVSS

SEQ ID NO: 41083 - protein, 116 aa, Artificial Sequence
  Chemically Synthesized
QVQLQESGGGLVQAGGSLRLSCAASGSIFVQVGMGWYRQAPGKEREFVAGIDGGSNTYYADSVKGRFTISRDNAKNTVYLQMNSLKPEDTAVYYCAVYYWPYLRYWGQGTQVTVSS

SEQ ID NO: 41084 - protein, 122 aa, Artificial Sequence
  Chemically Synthesized
QVQLQESGGGLVQAGGSLRLSCAASGNISLDGIMGWYRQAPGKERELVATISTGGNTNYADSVKGRFTISRDNAKNTVYLQMNSLKPEDTAVYYCAAIWGSYPAFAGYLDYWGQGTQVTVSS

SEQ ID NO: 41085 - protein, 122 aa, Artificial Sequence
  Chemically Synthesized
QVQLQESGGGLVQAGGSLRLSCAASGNISLVLYMGWYRQAPGKERELVASINLGGTTYYADSVKGRFTISRDNAKNTVYLQMNSLKPEDTAVYYCAVHVAQFYLYGWKLVYWGQGTQVTVSS

SEQ ID NO: 41086 - protein, 126 aa, Artificial Sequence
  Chemically Synthesized
QVQLQESGGGLVQAGGSLRLSCAASGSIFGRSAMGWYRQAPGKERELVAAINVGSITYYADSVKGRFTISRDNAKNTVYLQMNSLKPEDTAVYYCAAIRPFHRLYLQEHRYRHKYWGQGTQVTVSS

SEQ ID NO: 41087 - protein, 118 aa, Artificial Sequence
  Chemically Synthesized
QVQLQESGGGLVQAGGSLRLSCAASGTISPSQSMGWYRQAPGKERELVASIAYGANTYYADSVKGRFTISRDNAKNTVYLQMNSLKPEDTAVYYCAVEPRHAGDYYYWGQGTQVTVSS

SEQ ID NO: 41088 - protein, 119 aa, Artificial Sequence
  Chemically Synthesized
QVQLQESGGGLVQAGGSLRLSCAASGNIFVYARMGWYRQAPGKERELVASITRVGGSTYYADSVKGRFTISRDNAKNTVYLQMNSLKPEDTAVYYCAVRRGTWYRYSYWGQGTQVTVSS

SEQ ID NO: 41089 - protein, 122 aa, Artificial Sequence
  Chemically Synthesized
QVQLQESGGGLVQAGGSLRLSCAASGTISHGLFMGWYRQAPGKERELVASISYGSITYYADSVKGRFTISRDNAKNTVYLQMNSLKPEDTAVYYCAVYRQYELYDAANLYYWGQGTQVTVSS

SEQ ID NO: 41090 - protein, 118 aa, Artificial Sequence
  Chemically Synthesized
QVQLQESGGGLVQAGGSLRLSCAASGYIFPYYEMGWYRQAPGKEREFVASIGRGAITNYADSVKGRFTISRDNAKNTVYLQMNSLKPEDTAVYYCAVWRFYRRYYFYWGQGTQVTVSS

SEQ ID NO: 41091 - protein, 124 aa, Artificial Sequence
  Chemically Synthesized
QVQLQESGGGLVQAGGSLRLSCAASGYISDAYMGWYRQAPGKERELVASITYGGSTNYADSVKGRFTISRDNAKNTVYLQMNSLKPEDTAVYYCAAYEWRIVRGSNQLKYDMYWGQGTQVTVSS

SEQ ID NO: 41092 - protein, 119 aa, Artificial Sequence
  Chemically Synthesized
QVQLQESGGGLVQAGGSLRLSCAASGNIFLDYLMGWYRQAPGKERELVATINGGANTNYADSVKGRFTISRDNAKNTVYLQMNSLKPEDTAVYYCAVYPRGILSAAVYWGQGTQVTVSS

SEQ ID NO: 41093 - protein, 125 aa, Artificial Sequence
  Chemically Synthesized
QVQLQESGGGLVQAGGSLRLSCAASGTISDLRWMGWYRQAPGKERELVAAIDSGTTTYYADSVKGRFTISRDNAKNTVYLQMNSLKPEDTAVYYCAASREQRTGRAQGDYHSMYWGQGTQVTVSS

SEQ ID NO: 41094 - protein, 126 aa, Artificial Sequence
  Chemically Synthesized
QVQLQESGGGLVQAGGSLRLSCAASGNIFGVRRMGWYRQAPGKEREFVASISRGTNTYYADSVKGRFTISRDNAKNTVYLQMNSLKPEDTAVYYCAAYVPYYRYQADDHYARYYYWGQGTQVTVSS

SEQ ID NO: 41095 - protein, 118 aa, Artificial Sequence
  Chemically Synthesized
QVQLQESGGGLVQAGGSLRLSCAASGNIFAFGWMGWYRQAPGKERELVASITRGGNTYYADSVKGRFTISRDNAKNTVYLQMNSLKPEDTAVYYCAVRYYLTKYHRYWGQGTQVTVSS

SEQ ID NO: 41096 - protein, 122 aa, Artificial Sequence
  Chemically Synthesized
QVQLQESGGGLVQAGGSLRLSCAASGNISGREDMGWYRQAPGKEREFVAAIAPGGTTYYADSVKGRFTISRDNAKNTVYLQMNSLKPEDTAVYYCAAEAYAWYLAPYSHSYWGQGTQVTVSS

SEQ ID NO: 41097 - protein, 118 aa, Artificial Sequence
  Chemically Synthesized
QVQLQESGGGLVQAGGSLRLSCAASGYISRFRFMGWYRQAPGKEREFVASIDYGGITYYADSVKGRFTISRDNAKNTVYLQMNSLKPEDTAVYYCAVYKSIYGQFAYWGQGTQVTVSS

SEQ ID NO: 41098 - protein, 117 aa, Artificial Sequence
  Chemically Synthesized
QVQLQESGGGLVQAGGSLRLSCAASGTIFEDYEMGWYRQAPGKEREFVAAIADGGNTNYADSVKGRFTISRDNAKNTVYLQMNSLKPEDTAVYYCASGVVNLLVMYWGQGTQVTVSS

SEQ ID NO: 41099 - protein, 122 aa, Artificial Sequence
  Chemically Synthesized
QVQLQESGGGLVQAGGSLRLSCAASGSIFLGGPMGWYRQAPGKEREFVATIGYGANTNYADSVKGRFTISRDNAKNTVYLQMNSLKPEDTAVYYCAAYIHYYVDVLEAHYYWGQGTQVTVSS

SEQ ID NO: 41100 - protein, 123 aa, Artificial Sequence
  Chemically Synthesized
QVQLQESGGGLVQAGGSLRLSCAASGYISGRWFMGWYRQAPGKEREFVASINRGASTNYADSVKGRFTISRDNAKNTVYLQMNSLKPEDTAVYYCAVIVYKRWGGQAYRHRYWGQGTQVTVSS

SEQ ID NO: 41101 - protein, 126 aa, Artificial Sequence
  Chemically Synthesized
QVQLQESGGGLVQAGGSLRLSCAASGSISPYIKMGWYRQAPGKEREFVATIGYGASTYYADSVKGRFTISRDNAKNTVYLQMNSLKPEDTAVYYCAAWYVYQWNLVYVPLGIFDYWGQGTQVTVSS

SEQ ID NO: 41102 - protein, 119 aa, Artificial Sequence
  Chemically Synthesized
QVQLQESGGGLVQAGGSLRLSCAASGTIFGADYMGWYRQAPGKERELVAGIADGASTNYADSVKGRFTISRDNAKNTVYLQMNSLKPEDTAVYYCATSGYPYYLYYLYWGQGTQVTVSS

SEQ ID NO: 41103 - protein, 118 aa, Artificial Sequence
  Chemically Synthesized
QVQLQESGGGLVQAGGSLRLSCAASGNIFRGGYMGWYRQAPGKEREFVAAIARGGSTYYADSVKGRFTISRDNAKNTVYLQMNSLKPEDTAVYYCAAKRRRGPVLGYWGQGTQVTVSS

SEQ ID NO: 41104 - protein, 122 aa, Artificial Sequence
  Chemically Synthesized
QVQLQESGGGLVQAGGSLRLSCAASGSISPYDAMGWYRQAPGKEREFVATIGFGANTYYADSVKGRFTISRDNAKNTVYLQMNSLKPEDTAVYYCAAAGGQVRYEYADHFYWGQGTQVTVSS

SEQ ID NO: 41105 - protein, 115 aa, Artificial Sequence
  Chemically Synthesized
QVQLQESGGGLVQAGGSLRLSCAASGYIFGYENMGWYRQAPGKERELVAAISKGAITNYADSVKGRFTISRDNAKNTVYLQMNSLKPEDTAVYYCAGQRWSSCYWGQGTQVTVSS

SEQ ID NO: 41106 - protein, 110 aa, Artificial Sequence
  Chemically Synthesized
QVQLQESGGGLVQAGGSLRLSCAASGTIFVDYGMGWYRQAPGKEREFVAAIAKGSTTNYADSVKGRFTISRDNAKNTVYLQMNSLKPEDTAVYYCAVNYWGQGTQVTVSS

SEQ ID NO: 41107 - protein, 122 aa, Artificial Sequence
  Chemically Synthesized
QVQLQESGGGLVQAGGSLRLSCAASGTIFRSDYMGWYRQAPGKEREFVASIGHGGSTNYADSVKGRFTISRDNAKNTVYLQMNSLKPEDTAVYYCAVQDSPTTRIAGLYDYWGQGTQVTVSS

SEQ ID NO: 41108 - protein, 125 aa, Artificial Sequence
  Chemically Synthesized
QVQLQESGGGLVQAGGSLRLSCAASGTISIEYSMGWYRQAPGKERELVASITYGSSTYYADSVKGRFTISRDNAKNTVYLQMNSLKPEDTAVYYCAATWPYVPGWLTPFLQFNYWGQGTQVTVSS

SEQ ID NO: 41109 - protein, 118 aa, Artificial Sequence
  Chemically Synthesized
QVQLQESGGGLVQAGGSLRLSCAASGSISPSSEMGWYRQAPGKERELVASITGGGTTYYADSVKGRFTISRDNAKNTVYLQMNSLKPEDTAVYYCAVRVALRWDLSYWGQGTQVTVSS

SEQ ID NO: 41110 - protein, 117 aa, Artificial Sequence
  Chemically Synthesized
QVQLQESGGGLVQAGGSLRLSCAASGSISHRRAMGWYRQAPGKEREFVAGIAYGAITYYADSVKGRFTISRDNAKNTVYLQMNSLKPEDTAVYYCAAVSRDRGTFYWGQGTQVTVSS

SEQ ID NO: 41111 - protein, 108 aa, Artificial Sequence
  Chemically Synthesized
QVQLQESGGGLVQAGGSLRLSCAASGSISPYYEMGWYRQAPGKERESSTYYADSVKGRFTISRDNAKNTVYLQMNSLKPEDTAVYYCAAQHPYPKRYWGQGTQVTVSS

SEQ ID NO: 41112 - protein, 118 aa, Artificial Sequence
  Chemically Synthesized
QVQLQESGGGLVQAGGSLRLSCAASGTIFYFYLMGWYRQAPGKERELVAAIARGASTYYADSVKGRFTISRDNAKNTVYLQMNSLKPEDTAVYYCAVGRPHVHAHRYWGQGTQVTVSS

SEQ ID NO: 41113 - protein, 118 aa, Artificial Sequence
  Chemically Synthesized
QVQLQESGGGLVQAGGSLRLSCAASGYIFRVAYMGWYRQAPGKERELVASIGVGGSTNYADSVKGRFTISRDNAKNTVYLQMNSLKPEDTAVYYCAAYRWWRSAHPYWGQGTQVTVSS

SEQ ID NO: 41114 - protein, 118 aa, Artificial Sequence
  Chemically Synthesized
QVQLQESGGGLVQAGGSLRLSCAASGYIFFPRWMGWYRQAPGKERELVAAITAGATTYYADSVKGRFTISRDNAKNTVYLQMNSLKPEDTAVYYCAVYGTAGDQFYYWGQGTQVTVSS

SEQ ID NO: 41115 - protein, 117 aa, Artificial Sequence
  Chemically Synthesized
QVQLQESGGGLVQAGGSLRLSCAASGNIFWPPIMGWYRQAPGKERELVAAIDYGTTTYYADSVKGRFTISRDNAKNTVYLQMNSLKPEDTAVYYCAAWGGSVTFLYWGQGTQVTVSS

SEQ ID NO: 41116 - protein, 120 aa, Artificial Sequence
  Chemically Synthesized
QVQLQESGGGLVQAGGSLRLSCAASGTATSKMGWYRQAPGKEREFVAGIGKGGITYYADSVKGRFTISRDNAKNTVYLQMNSLKPEDTAVYYCAATGAIVSYYGRIHRYWGQGTQVTVSS

SEQ ID NO: 41117 - protein, 118 aa, Artificial Sequence
  Chemically Synthesized
QVQLQESGGGLVQAGGSLRLSCAASGNIFDSFEMGWYRQAPGKERELVATIDGGTSTNYADSVKGRFTISRDNAKNTVYLQMNSLKPEDTAVYYCAVGDDLLYTLAYWGQGTQVTVSS

SEQ ID NO: 41118 - protein, 116 aa, Artificial Sequence
  Chemically Synthesized
QVQLQESGGGLVQAGGSLRLSCAASGSISYSMGWYRQAPGKERELVAAIAGGTTTNYADSVKGRFTISRDNAKNTVYLQMNSLKPEDTAVYYCAAYDPYPYTFDYWGQGTQVTVSS

SEQ ID NO: 41119 - protein, 117 aa, Artificial Sequence
  Chemically Synthesized
QVQLQESGGGLVQAGGSLRLSCAASGSISYATVMGWYRQAPGKERELVAGIGRGGNTYYADSVKGRFTISRDNAKNTVYLQMNSLKPEDTAVYYCAVILLTTVTLYWGQGTQVTVSS

SEQ ID NO: 41120 - protein, 117 aa, Artificial Sequence
  Chemically Synthesized
QVQLQESGGGLVQAGGSLRLSCAASGNISYSRMGWYRQAPGKEREFVATITIGGSTYYADSVKGRFTISRDNAKNTVYLQMNSLKPEDTAVYYCAVRHTWLRQHYYWGQGTQVTVSS

SEQ ID NO: 41121 - protein, 118 aa, Artificial Sequence
  Chemically Synthesized
QVQLQESGGGLVQAGGSLRLSCAASGTIFTRGVMGWYRQAPGKERELVAAIDSGATTYYADSVKGRFTISRDNAKNTVYLQMNSLKPEDTAVYYCAVRYARRRWYGYWGQGTQVTVSS

SEQ ID NO: 41122 - protein, 126 aa, Artificial Sequence
  Chemically Synthesized
QVQLQESGGGLVQAGGSLRLSCAASGTIFDIPDMGWYRQAPGKEREFVAAIDYGTTTYYADSVKGRFTISRDNAKNTVYLQMNSLKPEDTAVYYCAVGDSYDQDVGSIGTDNHTYWGQGTQVTVSS

SEQ ID NO: 41123 - protein, 118 aa, Artificial Sequence
  Chemically Synthesized
QVQLQESGGGLVQAGGSLRLSCAASGYISYVYAMGWYRQAPGKEREFVAAISYGANTYYADSVKGRFTISRDNAKNTVYLQMNSLKPEDTAVYYCAAYGYDQGAYAYWGQGTQVTVSS

SEQ ID NO: 41124 - protein, 118 aa, Artificial Sequence
  Chemically Synthesized
QVQLQESGGGLVQAGGSLRLSCAASGNIFDRIVMGWYRQAPGKERELVASIGYGATTYYADSVKGRFTISRDNAKNTVYLQMNSLKPEDTAVYYCAAALYRSSWLSYWGQGTQVTVSS

SEQ ID NO: 41125 - protein, 126 aa, Artificial Sequence
  Chemically Synthesized
QVQLQESGGGLVQAGGSLRLSCAASGTISDSDYMGWYRQAPGKEREFVAGIDYGGITYYADSVKGRFTISRDNAKNTVYLQMNSLKPEDTAVYYCAVRQYGYAVYQNIDELDHSYWGQGTQVTVSS

SEQ ID NO: 41126 - protein, 119 aa, Artificial Sequence
  Chemically Synthesized
QVQLQESGGGLVQAGGSLRLSCAASGNISGVWAMGWYRQAPGKEREFVAAIGYGGTNTNYADSVKGRFTISRDNAKNTVYLQMNSLKPEDTAVYYCAALYWSGRYHYYWGQGTQVTVSS

SEQ ID NO: 41127 - protein, 118 aa, Artificial Sequence
  Chemically Synthesized
QVQLQESGGGLVQAGGSLRLSCAASGNIFAIWDMGWYRQAPGKEREFVAAIAFGGSTNYADSVKGRFTISRDNAKNTVYLQMNSLKPEDTAVYYCAVPPEGGPRHTYWGQGTQVTVSS

SEQ ID NO: 41128 - protein, 122 aa, Artificial Sequence
  Chemically Synthesized
QVQLQESGGGLVQAGGSLRLSCAASGNIFDYGVMGWYRQAPGKEREFVAGITYGTITNYADSVKGRFTISRDNAKNTVYLQMNSLKPEDTAVYYCAAAWYEGLYDYEWHYYWGQGTQVTVSS

SEQ ID NO: 41129 - protein, 126 aa, Artificial Sequence
  Chemically Synthesized
QVQLQESGGGLVQAGGSLRLSCAASGNIFRRGEMGWYRQAPGKEREFVAGISLGTTTNYADSVKGRFTISRDNAKNTVYLQMNSLKPEDTAVYYCAVDDYYWPSDADTADEYLYYWGQGTQVTVSS

SEQ ID NO: 41130 - protein, 122 aa, Artificial Sequence
  Chemically Synthesized
QVQLQESGGGLVQAGGSLRLSCAASGSISSTGGMGWYRQAPGKERELVAGIDEGSTTNYADSVKGRFTISRDNAKNTVYLQMNSLKPEDTAVYYCAVQGAWAGGGGGDHKYWGQGTQVTVSS

SEQ ID NO: 41131 - protein, 117 aa, Artificial Sequence
  Chemically Synthesized
QVQLQESGGGLVQAGGSLRLSCAASGNIFHSDYMGWYRQAPGKERELVAGIGLGATTNYADSVKGRFTISRDNAKNTVYLQMNSLKPEDTAVYYCAADIYGGVRHYWGQGTQVTVSS

SEQ ID NO: 41132 - protein, 118 aa, Artificial Sequence
  Chemically Synthesized
QVQLQESGGGLVQAGGSLRLSCAASGNIFFNYAMGWYRQAPGKEREFVAAIGYGASTNYADSVKGRFTISRDNAKNTVYLQMNSLKPEDTAVYYCAVLRYYTVFHYYWGQGTQVTVSS

SEQ ID NO: 41133 - protein, 111 aa, Artificial Sequence
  Chemically Synthesized
QVQLQESGGGLVQAGGSLRLSCAASGYISLYYSMGWYRQAPGKEREFVAGINLGATTNYADSVKGRFTISRDNAKNTVYLQMNSLKPEDTAVYYCARYDYWGQGTQVTVSS

SEQ ID NO: 41134 - protein, 118 aa, Artificial Sequence
  Chemically Synthesized
QVQLQESGGGLVQAGGSLRLSCAASGYISHVFDMGWYRQAPGKERELVATIDSGATTYYADSVKGRFTISRDNAKNTVYLQMNSLKPEDTAVYYCAVDPTAWVYLDYWGQGTQVTVSS

SEQ ID NO: 41135 - protein, 125 aa, Artificial Sequence
  Chemically Synthesized
QVQLQESGGGLVQAGGSLRLSCAASGYISPQDTMGWYRQAPGKERELVAVLLLVLIPYADSVKGRFTISRDNAKNTVYLQMNSLKPEDTAVYYCAALYRSYVGRDYYGPYQYAYWGQGTQVTVSS

SEQ ID NO: 41136 - protein, 111 aa, Artificial Sequence
  Chemically Synthesized
QVQLQESGGGLVQAGGSLRLSCAASGSIFGDGPMGWYRQAPGKERELVAGIGGGTSTNYADSVKGRFTISRDNAKNTVYLQMNSLKPEDTAVYYCAVYDYWGQGTQVTVSS

SEQ ID NO: 41137 - protein, 126 aa, Artificial Sequence
  Chemically Synthesized
QVQLQESGGGLVQAGGSLRLSCAASGNIFFARYMGWYRQAPGKERELVATISGGGSTYYADSVKGRFTISRDNAKNTVYLQMNSLKPEDTAVYYCAARNLFPNLVTEITYGPLAYWGQGTQVTVSS

SEQ ID NO: 41138 - protein, 118 aa, Artificial Sequence
  Chemically Synthesized
QVQLQESGGGLVQAGGSLRLSCAASGTIFRYIRMGWYRQAPGKERELVASIARGGNTYYADSVKGRFTISRDNAKNTVYLQMNSLKPEDTAVYYCAVGYQYRPRLNYWGQGTQVTVSS

SEQ ID NO: 41139 - protein, 117 aa, Artificial Sequence
  Chemically Synthesized
QVQLQESGGGLVQAGGSLRLSCAASGYISSLVYMGWYRQAPGKERELVAAIAKGTITYYADSVKGRFTISRDNAKNTVYLQMNSLKPEDTAVYYCAVRPYYPSLLYWGQGTQVTVSS

SEQ ID NO: 41140 - protein, 118 aa, Artificial Sequence
  Chemically Synthesized
QVQLQESGGGLVQAGGSLRLSCAASGNIFYSTYMGWYRQAPGKEREFVASIGAGTSTNYADSVKGRFTISRDNAKNTVYLQMNSLKPEDTAVYYCAVQRYYYVRLIYWGQGTQVTVSS

SEQ ID NO: 41141 - protein, 123 aa, Artificial Sequence
  Chemically Synthesized
QVQLQESGGGLVQAGGSLRLSCAASGTIFFGYTYMGWYRQAPGKEREFVAGIDQGGTTYYADSVKGRFTISRDNAKNTVYLQMNSLKPEDTAVYYCAAIGSYYGYWYSLFRYWGQGTQVTVSS

SEQ ID NO: 41142 - protein, 118 aa, Artificial Sequence
  Chemically Synthesized
QVQLQESGGGLVQAGGSLRLSCAASGTIFLDDSMGWYRQAPGKEREFVAAINYGSITNYADSVKGRFTISRDNAKNTVYLQMNSLKPEDTAVYYCAAALYPRYTHAYWGQGTQVTVSS

SEQ ID NO: 41143 - protein, 117 aa, Artificial Sequence
  Chemically Synthesized
QVQLQESGGGLVQAGGSLRLSCAASGNISVDDGMGWYRQAPGKEREFVAAIGHGTSTNYADSVKGRFTISRDNAKNTVYLQMNSLKPEDTAVYYCAAEYEGYQRHYWGQGTQVTVSS

SEQ ID NO: 41144 - protein, 118 aa, Artificial Sequence
  Chemically Synthesized
QVQLQESGGGLVQAGGSLRLSCAASGNIFHSIRMGWYRQAPGKEREFVAGISYGSTTNYADSVKGRFTISRDNAKNTVYLQMNSLKPEDTAVYYCAVNYWTRYRHRYWGQGTQVTVSS

SEQ ID NO: 41145 - protein, 118 aa, Artificial Sequence
  Chemically Synthesized
QVQLQESGGGLVQAGGSLRLSCAASGYISLGKYMGWYRQAPGKERELVATIDVGSITYYADSVKGRFTISRDNAKNTVYLQMNSLKPEDTAVYYCAADGWYYSSLSYWGQGTQVTVSS

SEQ ID NO: 41146 - protein, 118 aa, Artificial Sequence
  Chemically Synthesized
QVQLQESGGGLVQAGGSLRLSCAASGTIFLLRYMGWYRQAPGKERELVAGIGRGTNTYYADSVKGRFTISRDNAKNTVYLQMNSLKPEDTAVYYCAAYTAITRTHAYWGQGTQVTVSS

SEQ ID NO: 41147 - protein, 115 aa, Artificial Sequence
  Chemically Synthesized
QVQLQESGGGLVQAGGSLRLSCAASGYISLQRGMGWYRQAPGKERELVAAIAYGGITNYADSVKGRFTISRDNAKNTVYLQMNSLKPEDTAVYYCAVPYKNLTYWGQGTQVTVSS

SEQ ID NO: 41148 - protein, 117 aa, Artificial Sequence
  Chemically Synthesized
QVQLQESGGGLVQAGGSLRLSCAASGKFLTMLMGWYRQAPGKEREFVAGISGGGTTYYADSVKGRFTISRDNAKNTVYLQMNSLKPEDTAVYYCAAGIDYWPYLDYWGQGTQVTVSS

SEQ ID NO: 41149 - protein, 126 aa, Artificial Sequence
  Chemically Synthesized
QVQLQESGGGLVQAGGSLRLSCAASGTISYPSAMGWYRQAPGKEREFVAGITYGATTNYADSVKGRFTISRDNAKNTVYLQMNSLKPEDTAVYYCAVVHFDPFYTGSNRSGGLYYWGQGTQVTVSS

SEQ ID NO: 41150 - protein, 118 aa, Artificial Sequence
  Chemically Synthesized
QVQLQESGGGLVQAGGSLRLSCAASGYIFVRSYMGWYRQAPGKERELVAGIAYGGITYYADSVKGRFTISRDNAKNTVYLQMNSLKPEDTAVYYCAVAEAWASTFYYWGQGTQVTVSS

SEQ ID NO: 41151 - protein, 122 aa, Artificial Sequence
  Chemically Synthesized
QVQLQESGGGLVQAGGSLRLSCAASGTISTSSFMGWYRQAPGKEREFVATIGYGTNTYYADSVKGRFTISRDNAKNTVYLQMNSLKPEDTAVYYCAATDRADYYKAAQLYYWGQGTQVTVSS

SEQ ID NO: 41152 - protein, 123 aa, Artificial Sequence
  Chemically Synthesized
QVQLQESGGGLVQAGGSLRLSCAASGSIFGRNNMGWYRQAPGKERELVAAINVGSTTNYADSVKGRFTISRDNAKNTVYLQMNSLKPEDTAVYYCAVLWGRGHVAAVRYLSYWGQGTQVTVSS

SEQ ID NO: 41153 - protein, 122 aa, Artificial Sequence
  Chemically Synthesized
QVQLQESGGGLVQAGGSLRLSCAASGSISTAHDMGWYRQAPGKERELVAAIGRGGITYYADSVKGRFTISRDNAKNTVYLQMNSLKPEDTAVYYCAAFFHLSWYVPDLYFYWGQGTQVTVSS

SEQ ID NO: 41154 - protein, 122 aa, Artificial Sequence
  Chemically Synthesized
QVQLQESGGGLVQAGGSLRLSCAASGYISGTGGMGWYRQAPGKEREFVAGITRGSTTYYADSVKGRFTISRDNAKNTVYLQMNSLKPEDTAVYYCAARRTRVLGGIHPHRYWGQGTQVTVSS

SEQ ID NO: 41155 - protein, 118 aa, Artificial Sequence
  Chemically Synthesized
QVQLQESGGGLVQAGGSLRLSCAASGNIFYYYRMGWYRQAPGKEREFVASITLGTSTYYADSVKGRFTISRDNAKNTVYLQMNSLKPEDTAVYYCAVPTILGIHFSYWGQGTQVTVSS

SEQ ID NO: 41156 - protein, 118 aa, Artificial Sequence
  Chemically Synthesized
QVQLQESGGGLVQAGGSLRLSCAASGTIFKFRVMGWYRQAPGKEREFVAGIGLGGTTNYADSVKGRFTISRDNAKNTVYLQMNSLKPEDTAVYYCAANRRYPPRHDYWGQGTQVTVSS

SEQ ID NO: 41157 - protein, 122 aa, Artificial Sequence
  Chemically Synthesized
QVQLQESGGGLVQAGGSLRLSCAASGTIFVYYRMGWYRQAPGKERELVAAIDYGSSTYYADSVKGRFTISRDNAKNTVYLQMNSLKPEDTAVYYCAVTAVAQDFALTGLYYWGQGTQVTVSS

SEQ ID NO: 41158 - protein, 117 aa, Artificial Sequence
  Chemically Synthesized
QVQLQESGGGLVQAGGSLRLSCAASGNISTLTMGWYRQAPGKERELVAGITEGGTTYYADSVKGRFTISRDNAKNTVYLQMNSLKPEDTAVYYCAVSYRRYAGHIYWGQGTQVTVSS

SEQ ID NO: 41159 - protein, 118 aa, Artificial Sequence
  Chemically Synthesized
QVQLQESGGGLVQAGGSLRLSCAASGYISAYTDMGWYRQAPGKEREFVAGIDWGTTTYYADSVKGRFTISRDNAKNTVYLQMNSLKPEDTAVYYCAASYIPSWYHGYWGQGTQVTVSS

SEQ ID NO: 41160 - protein, 122 aa, Artificial Sequence
  Chemically Synthesized
QVQLQESGGGLVQAGGSLRLSCAASGYIFTLTAMGWYRQAPGKEREFVATITVGSSTYYADSVKGRFTISRDNAKNTVYLQMNSLKPEDTAVYYCAVGWFGSYFLDDGFRYWGQGTQVTVSS

SEQ ID NO: 41161 - protein, 122 aa, Artificial Sequence
  Chemically Synthesized
QVQLQESGGGLVQAGGSLRLSCAASGYIFAWIAMGWYRQAPGKEREFVATIDRGSSTNYADSVKGRFTISRDNAKNTVYLQMNSLKPEDTAVYYCAADVRYVTDGSFDHRYWGQGTQVTVSS

SEQ ID NO: 41162 - protein, 118 aa, Artificial Sequence
  Chemically Synthesized
QVQLQESGGGLVQAGGSLRLSCAASGSISRYYTMGWYRQAPGKERELVAAIDIGSNTYYADSVKGRFTISRDNAKNTVYLQMNSLKPEDTAVYYCAAAVYPLSAHYYWGQGTQVTVSS

SEQ ID NO: 41163 - protein, 122 aa, Artificial Sequence
  Chemically Synthesized
QVQLQESGGGLVQAGGSLRLSCAASGNIFDGYGMGWYRQAPGKEREFVAAITYGSSTYYADSVKGRFTISRDNAKNTVYLQMNSLKPEDTAVYYCAVWWRDNTPNRYYLLYWGQGTQVTVSS

SEQ ID NO: 41164 - protein, 118 aa, Artificial Sequence
  Chemically Synthesized
QVQLQESGGGLVQAGGSLRLSCAASGYIFSQLFMGWYRQAPGKEREFVAAITAGGSTYYADSVKGRFTISRDNAKNTVYLQMNSLKPEDTAVYYCAVVGAINTGYGYWGQGTQVTVSS

SEQ ID NO: 41165 - protein, 118 aa, Artificial Sequence
  Chemically Synthesized
QVQLQESGGGLVQAGGSLRLSCAASGTISQATAMGWYRQAPGKEREFVAAINDGGSTYYADSVKGRFTISRDNAKNTVYLQMNSLKPEDTAVYYCAVQVGPVRAHVYWGQGTQVTVSS

SEQ ID NO: 41166 - protein, 122 aa, Artificial Sequence
  Chemically Synthesized
QVQLQESGGGLVQAGGSLRLSCAASGSIFTTPKMGWYRQAPGKERELVAGIGHGGITYYADSVKGRFTISRDNAKNTVYLQMNSLKPEDTAVYYCAAPIQRGSFTKWWHTYWGQGTQVTVSS

SEQ ID NO: 41167 - protein, 118 aa, Artificial Sequence
  Chemically Synthesized
QVQLQESGGGLVQAGGSLRLSCAASGNIFASTFMGWYRQAPGKEREFVATIGYGGITYYADSVKGRFTISRDNAKNTVYLQMNSLKPEDTAVYYCAATYVRNWYHAYWGQGTQVTVSS

SEQ ID NO: 41168 - protein, 118 aa, Artificial Sequence
  Chemically Synthesized
QVQLQESGGGLVQAGGSLRLSCAASGNISPFDYMGWYRQAPGKERELVATITYGGNTNYADSVKGRFTISRDNAKNTVYLQMNSLKPEDTAVYYCAASLYPVYHLLYWGQGTQVTVSS

SEQ ID NO: 41169 - protein, 122 aa, Artificial Sequence
  Chemically Synthesized
QVQLQESGGGLVQAGGSLRLSCAASGTISWRFPMGWYRQAPGKERELVATINRGTTTNYADSVKGRFTISRDNAKNTVYLQMNSLKPEDTAVYYCAALSYGDPQRDDYLTYWGQGTQVTVSS

SEQ ID NO: 41170 - protein, 118 aa, Artificial Sequence
  Chemically Synthesized
QVQLQESGGGLVQAGGSLRLSCAASGTISHDPYMGWYRQAPGKERELVATIDWGGSTNYADSVKGRFTISRDNAKNTVYLQMNSLKPEDTAVYYCAAYGSYYAVLHYWGQGTQVTVSS

SEQ ID NO: 41171 - protein, 122 aa, Artificial Sequence
  Chemically Synthesized
QVQLQESGGGLVQAGGSLRLSCAASGNISDGGAMGWYRQAPGKERELVAAINKGSNTNYADSVKGRFTISRDNAKNTVYLQMNSLKPEDTAVYYCAVEYDRIGLGQAYFYYWGQGTQVTVSS

SEQ ID NO: 41172 - protein, 126 aa, Artificial Sequence
  Chemically Synthesized
QVQLQESGGGLVQAGGSLRLSCAASGNISRNRRMGWYRQAPGKERELVATISYGGNTNYADSVKGRFTISRDNAKNTVYLQMNSLKPEDTAVYYCAVFHVGGYYTDYPARYHHGYWGQGTQVTVSS

SEQ ID NO: 41173 - protein, 126 aa, Artificial Sequence
  Chemically Synthesized
QVQLQESGGGLVQAGGSLRLSCAASGYISARHYMGWYRQAPGKEREFVASISQGATTNYADSVKGRFTISRDNAKNTVYLQMNSLKPEDTAVYYCAANSVWTTRPVRDVVYWFGYWGQGTQVTVSS

SEQ ID NO: 41174 - protein, 126 aa, Artificial Sequence
  Chemically Synthesized
QVQLQESGGGLVQAGGSLRLSCAASGYIFDDHEMGWYRQAPGKEREFVAAITYGGITNYADSVKGRFTISRDNAKNTVYLQMNSLKPEDTAVYYCAVYYRIHSRPEPYTYADYGYWGQGTQVTVSS

SEQ ID NO: 41175 - protein, 122 aa, Artificial Sequence
  Chemically Synthesized
QVQLQESGGGLVQAGGSLRLSCAASGTIFGDPAMGWYRQAPGKERELVAGITNGGITYYADSVKGRFTISRDNAKNTVYLQMNSLKPEDTAVYYCAARRKYWLNPRPRYTYWGQGTQVTVSS

SEQ ID NO: 41176 - protein, 126 aa, Artificial Sequence
  Chemically Synthesized
QVQLQESGGGLVQAGGSLRLSCAASGTISVWRNMGWYRQAPGKERELVAAIDRGSNTNYADSVKGRFTISRDNAKNTVYLQMNSLKPEDTAVYYCAVKARPVDLYLYIWSDQHQYWGQGTQVTVSS

SEQ ID NO: 41177 - protein, 124 aa, Artificial Sequence
  Chemically Synthesized
QVQLQESGGGLVQAGGSLRLSCAASGYIFDTSAMGWYRQAPGKERELVATISHGATTYYADSVKGRFTISRDNAKNTVYLQMNSLKPEDTAVYYCAAPREFYSTLLRRVLVMYWGQGTQVTVSS

SEQ ID NO: 41178 - protein, 118 aa, Artificial Sequence
  Chemically Synthesized
QVQLQESGGGLVQAGGSLRLSCAASGTISFYYYMGWYRQAPGKEREFVAGIAVGGSTYYADSVKGRFTISRDNAKNTVYLQMNSLKPEDTAVYYCAARTWSYRRHIYWGQGTQVTVSS

SEQ ID NO: 41179 - protein, 122 aa, Artificial Sequence
  Chemically Synthesized
QVQLQESGGGLVQAGGSLRLSCAASGTIFVTEVMGWYRQAPGKERELVAGINIRCYYQYADSVKGRFTISRDNAKNTVYLQMNSLKPEDTAVYYCAVYYYTADGGIVDLDYWGQGTQVTVSS

SEQ ID NO: 41180 - protein, 118 aa, Artificial Sequence
  Chemically Synthesized
QVQLQESGGGLVQAGGSLRLSCAASGSIFYRPWMGWYRQAPGKEREFVAAISYGSSTYYADSVKGRFTISRDNAKNTVYLQMNSLKPEDTAVYYCAAWRWYDNRFTYWGQGTQVTVSS

SEQ ID NO: 41181 - protein, 121 aa, Artificial Sequence
  Chemically Synthesized
QVQLQESGGGLVQAGGSLRLSCAASGTISYRTMGWYRQAPGKEREFVASIGRGSITYYADSVKGRFTISRDNAKNTVYLQMNSLKPEDTAVYYCAARRGWRGPFDSTHQYWGQGTQVTVSS

SEQ ID NO: 41182 - protein, 122 aa, Artificial Sequence
  Chemically Synthesized
QVQLQESGGGLVQAGGSLRLSCAASGSIFSYVFMGWYRQAPGKEREFVAAISPGAITNYADSVKGRFTISRDNAKNTVYLQMNSLKPEDTAVYYCAAWYAVRPIYLYVHIYWGQGTQVTVSS

SEQ ID NO: 41183 - protein, 118 aa, Artificial Sequence
  Chemically Synthesized
QVQLQESGGGLVQAGGSLRLSCAASGYIFGRTPMGWYRQAPGKERELVAAIADGTITYYADSVKGRFTISRDNAKNTVYLQMNSLKPEDTAVYYCAAHRYWAKRHWYWGQGTQVTVSS

SEQ ID NO: 41184 - protein, 118 aa, Artificial Sequence
  Chemically Synthesized
QVQLQESGGGLVQAGGSLRLSCAASGNISYDDHMGWYRQAPGKERELVATINYGGSTNYADSVKGRFTISRDNAKNTVYLQMNSLKPEDTAVYYCAVSVKAHYPLPYWGQGTQVTVSS

SEQ ID NO: 41185 - protein, 118 aa, Artificial Sequence
  Chemically Synthesized
QVQLQESGGGLVQAGGSLRLSCAASGNISPTWKMGWYRQAPGKEREFVAAIAGGAITNYADSVKGRFTISRDNAKNTVYLQMNSLKPEDTAVYYCAVPWWRRYAHYYWGQGTQVTVSS

SEQ ID NO: 41186 - protein, 121 aa, Artificial Sequence
  Chemically Synthesized
QVQLQESGGGLVQAGGSLRLSCAASGYIFDAQPMGWYRQAPGKERELVAGIGVGAITNYADSVKGRFTISRDNAKNTVYLQMNSLKPEDTAVYYCAADLTESRVTTTILYWGQGTQVTVSS

SEQ ID NO: 41187 - protein, 118 aa, Artificial Sequence
  Chemically Synthesized
QVQLQESGGGLVQAGGSLRLSCAASGSIFGDYWMGWYRQAPGKERELVAAISRGANTNYADSVKGRFTISRDNAKNTVYLQMNSLKPEDTAVYYCAVVHWTDTSLSYWGQGTQVTVSS

SEQ ID NO: 41188 - protein, 110 aa, Artificial Sequence
  Chemically Synthesized
QVQLQESGGGLVQAGGSLRLSCAASGNISVLDQMGWYRQAPGKERELVAAIDYGTITNYADSVKGRFTISRDNAKNTVYLQMNSLKPEDTAVYYCATMYWGQGTQVTVSS

SEQ ID NO: 41189 - protein, 122 aa, Artificial Sequence
  Chemically Synthesized
QVQLQESGGGLVQAGGSLRLSCAASGNISTYVYMGWYRQAPGKERELVAAIGTGASTNYADSVKGRFTISRDNAKNTVYLQMNSLKPEDTAVYYCAVYRRTNYGYRSRLGYWGQGTQVTVSS

SEQ ID NO: 41190 - protein, 122 aa, Artificial Sequence
  Chemically Synthesized
QVQLQESGGGLVQAGGSLRLSCAASGYIFYYRYMGWYRQAPGKERELVAAIAYGTNTNYADSVKGRFTISRDNAKNTVYLQMNSLKPEDTAVYYCAVYVYTARWYDVGLIYWGQGTQVTVSS

SEQ ID NO: 41191 - protein, 121 aa, Artificial Sequence
  Chemically Synthesized
QVQLQESGGGLVQAGGSLRLSCAASGSIFWRRMGWYRQAPGKEREFVAGITWGANTYYADSVKGRFTISRDNAKNTVYLQMNSLKPEDTAVYYCAATRNYPGRNYGDLGYWGQGTQVTVSS

SEQ ID NO: 41192 - protein, 120 aa, Artificial Sequence
  Chemically Synthesized
QVQLQESGGGLVQAGGSLRLSCAASGSISYPLYMGWYRQAPGKERELLPVLLTVVLPYADSVKGRFTISRDNAKNTVYLQMNSLKPEDTAVYYCAAESFYDFSVRVVYYWGQGTQVTVSS

SEQ ID NO: 41193 - protein, 122 aa, Artificial Sequence
  Chemically Synthesized
QVQLQESGGGLVQAGGSLRLSCAASGSIFAAYDMGWYRQAPGKEREFVAAISPGAITYYADSVKGRFTISRDNAKNTVYLQMNSLKPEDTAVYYCAAPYLYYVVPDGDHPYWGQGTQVTVSS

SEQ ID NO: 41194 - protein, 118 aa, Artificial Sequence
  Chemically Synthesized
QVQLQESGGGLVQAGGSLRLSCAASGSIFERNTMGWYRQAPGKERELVASIDYGGNTYYADSVKGRFTISRDNAKNTVYLQMNSLKPEDTAVYYCAVTSYYYPQHAYWGQGTQVTVSS

SEQ ID NO: 41195 - protein, 118 aa, Artificial Sequence
  Chemically Synthesized
QVQLQESGGGLVQAGGSLRLSCAASGNISSGTGMGWYRQAPGKERELVASISYGATTNYADSVKGRFTISRDNAKNTVYLQMNSLKPEDTAVYYCAADQNTDGELGYWGQGTQVTVSS

SEQ ID NO: 41196 - protein, 118 aa, Artificial Sequence
  Chemically Synthesized
QVQLQESGGGLVQAGGSLRLSCAASGNIFPNRYMGWYRQAPGKEREFVAAIGYGAITYYADSVKGRFTISRDNAKNTVYLQMNSLKPEDTAVYYCAASRLWHISYFYWGQGTQVTVSS

SEQ ID NO: 41197 - protein, 122 aa, Artificial Sequence
  Chemically Synthesized
QVQLQESGGGLVQAGGSLRLSCAASGTIFVGGRMGWYRQAPGKEREFVAGIAPGSTTYYADSVKGRFTISRDNAKNTVYLQMNSLKPEDTAVYYCAVRNYYPSYYRGYYKYWGQGTQVTVSS

SEQ ID NO: 41198 - protein, 118 aa, Artificial Sequence
  Chemically Synthesized
QVQLQESGGGLVQAGGSLRLSCAASGNISYPAIMGWYRQAPGKERELVAAISDGAITYYADSVKGRFTISRDNAKNTVYLQMNSLKPEDTAVYYCAAVWLYYDGYGYWGQGTQVTVSS

SEQ ID NO: 41199 - protein, 122 aa, Artificial Sequence
  Chemically Synthesized
QVQLQESGGGLVQAGGSLRLSCAASGNIFQYNSMGWYRQAPGKERELVATITPGSTTYYADSVKGRFTISRDNAKNTVYLQMNSLKPEDTAVYYCAVYTVSHTQYDTGFGYWGQGTQVTVSS

SEQ ID NO: 41200 - protein, 122 aa, Artificial Sequence
  Chemically Synthesized
QVQLQESGGGLVQAGGSLRLSCAASGTISHYGLMGWYRQAPGKEREFVAGIAYGGNTYYADSVKGRFTISRDNAKNTVYLQMNSLKPEDTAVYYCAAYYPYRDPVLNQFDYWGQGTQVTVSS

SEQ ID NO: 41201 - protein, 122 aa, Artificial Sequence
  Chemically Synthesized
QVQLQESGGGLVQAGGSLRLSCAASGYISAYVTMGWYRQAPGKERELVAAIGPGGSTNYADSVKGRFTISRDNAKNTVYLQMNSLKPEDTAVYYCAAGWGYYLTWHHLHRYWGQGTQVTVSS

SEQ ID NO: 41202 - protein, 122 aa, Artificial Sequence
  Chemically Synthesized
QVQLQESGGGLVQAGGSLRLSCAASGTISLRTAMGWYRQAPGKEREFVAGIGRGANTYYADSVKGRFTISRDNAKNTVYLQMNSLKPEDTAVYYCAVRNHIWWAYLQPHGYWGQGTQVTVSS

SEQ ID NO: 41203 - protein, 122 aa, Artificial Sequence
  Chemically Synthesized
QVQLQESGGGLVQAGGSLRLSCAASGYISYKVIMGWYRQAPGKERELVASIGPGGNTNYADSVKGRFTISRDNAKNTVYLQMNSLKPEDTAVYYCAARGRLAHWFGRIYYYWGQGTQVTVSS

SEQ ID NO: 41204 - protein, 126 aa, Artificial Sequence
  Chemically Synthesized
QVQLQESGGGLVQAGGSLRLSCAASGTIFSWYVMGWYRQAPGKEREFVASIDRGGTTNYADSVKGRFTISRDNAKNTVYLQMNSLKPEDTAVYYCAAHYYDYEGGPWYTWSGHAYWGQGTQVTVSS

SEQ ID NO: 41205 - protein, 121 aa, Artificial Sequence
  Chemically Synthesized
QVQLQESGGGLVQAGGSLRLSCAASGYISDRWYMGWYRQAPGKERELVASIDDGSTTYYADSVKGRFTISRDNAKNTVYLQMNSLKPEDTAVYYCAVDFFSDSWNSTLLYWGQGTQVTVSS

SEQ ID NO: 41206 - protein, 118 aa, Artificial Sequence
  Chemically Synthesized
QVQLQESGGGLVQAGGSLRLSCAASGYIFRRYNMGWYRQAPGKERELVAGIAKGSTTYYADSVKGRFTISRDNAKNTVYLQMNSLKPEDTAVYYCAVKYWYGALYAYWGQGTQVTVSS

SEQ ID NO: 41207 - protein, 118 aa, Artificial Sequence
  Chemically Synthesized
QVQLQESGGGLVQAGGSLRLSCAASGYISYRWGMGWYRQAPGKEREFVAAINYGSSTYYADSVKGRFTISRDNAKNTVYLQMNSLKPEDTAVYYCAVFYSRKRGYGYWGQGTQVTVSS

SEQ ID NO: 41208 - protein, 118 aa, Artificial Sequence
  Chemically Synthesized
QVQLQESGGGLVQAGGSLRLSCAASGTIFQDGYMGWYRQAPGKERELVAGIAYGSITYYADSVKGRFTISRDNAKNTVYLQMNSLKPEDTAVYYCAASRYSLYWHYYWGQGTQVTVSS

SEQ ID NO: 41209 - protein, 118 aa, Artificial Sequence
  Chemically Synthesized
QVQLQESGGGLVQAGGSLRLSCAASGYIFQKYDMGWYRQAPGKERELVASIGYGTNTYYADSVKGRFTISRDNAKNTVYLQMNSLKPEDTAVYYCAAVYLFVLVYRYWGQGTQVTVSS

SEQ ID NO: 41210 - protein, 118 aa, Artificial Sequence
  Chemically Synthesized
QVQLQESGGGLVQAGGSLRLSCAASGSIFSFLTMGWYRQAPGKEREFVAAINVGGSTNYADSVKGRFTISRDNAKNTVYLQMNSLKPEDTAVYYCAVYIARGQSLGYWGQGTQVTVSS

SEQ ID NO: 41211 - protein, 121 aa, Artificial Sequence
  Chemically Synthesized
QVQLQESGGGLVQAGGSLRLSCAASGSIFRFYPMGWYRQAPGKERELVAAISNGTSTYYADSVKGRFTISRDNAKNTVYLQMNSLKPEDTAVYYCAARVGYAHYLRYHVYWGQGTQVTVSS

SEQ ID NO: 41212 - protein, 117 aa, Artificial Sequence
  Chemically Synthesized
QVQLQESGGGLVQAGGSLRLSCAASGTISYSVMGWYRQAPGKEREFVAGINHGGITNYADSVKGRFTISRDNAKNTVYLQMNSLKPEDTAVYYCAAWHDWRSHFPYWGQGTQVTVSS

SEQ ID NO: 41213 - protein, 126 aa, Artificial Sequence
  Chemically Synthesized
QVQLQESGGGLVQAGGSLRLSCAASGYISPYYVMGWYRQAPGKERELVAGIAGGGNTYYADSVKGRFTISRDNAKNTVYLQMNSLKPEDTAVYYCAVSLPYGTVLPRYYTTPLDYWGQGTQVTVSS

SEQ ID NO: 41214 - protein, 122 aa, Artificial Sequence
  Chemically Synthesized
QVQLQESGGGLVQAGGSLRLSCAASGNIFRPTHMGWYRQAPGKEREFVAGISFGSSTYYADSVKGRFTISRDNAKNTVYLQMNSLKPEDTAVYYCAAWRVSNYARRYPLGYWGQGTQVTVSS

SEQ ID NO: 41215 - protein, 118 aa, Artificial Sequence
  Chemically Synthesized
QVQLQESGGGLVQAGGSLRLSCAASGYIFKFYYMGWYRQAPGKEREFVASIARGTITNYADSVKGRFTISRDNAKNTVYLQMNSLKPEDTAVYYCAVGPWYSRIHRYWGQGTQVTVSS

SEQ ID NO: 41216 - protein, 118 aa, Artificial Sequence
  Chemically Synthesized
QVQLQESGGGLVQAGGSLRLSCAASGYISYSTTMGWYRQAPGKERELVASINKGTTTNYADSVKGRFTISRDNAKNTVYLQMNSLKPEDTAVYYCAARYTARPSLAYWGQGTQVTVSS

SEQ ID NO: 41217 - protein, 122 aa, Artificial Sequence
  Chemically Synthesized
QVQLQESGGGLVQAGGSLRLSCAASGNISRLQGMGWYRQAPGKEREFVASINRGSSTYYADSVKGRFTISRDNAKNTVYLQMNSLKPEDTAVYYCAVRLWRIGYSQRRLGYWGQGTQVTVSS

SEQ ID NO: 41218 - protein, 116 aa, Artificial Sequence
  Chemically Synthesized
QVQLQESGGGLVQAGGSLRLSCAASGTIFVYSMGWYRQAPGKERELVASIGYGGSTNYADSVKGRFTISRDNAKNTVYLQMNSLKPEDTAVYYCAARYDYPDLIYWGQGTQVTVSS

SEQ ID NO: 41219 - protein, 118 aa, Artificial Sequence
  Chemically Synthesized
QVQLQESGGGLVQAGGSLRLSCAASGNIFLATNMGWYRQAPGKEREFVASIAWGANTNYADSVKGRFTISRDNAKNTVYLQMNSLKPEDTAVYYCAADPTIGPYYRYWGQGTQVTVSS

SEQ ID NO: 41220 - protein, 118 aa, Artificial Sequence
  Chemically Synthesized
QVQLQESGGGLVQAGGSLRLSCAASGNIFPDAKMGWYRQAPGKEREFVAGIGRGSNTYYADSVKGRFTISRDNAKNTVYLQMNSLKPEDTAVYYCAVRRGYFWLHYYWGQGTQVTVSS

SEQ ID NO: 41221 - protein, 123 aa, Artificial Sequence
  Chemically Synthesized
QVQLQESGGGLVQAGGSLRLSCAASGYIFHYQYMGWYRQAPGKEREFVAAINYGSSTNYADSVKGRFTISRDNAKNTVYLQMNSLKPEDTAVYYCAAALYWSWRTKGYEHYYWGQGTQVTVSS

SEQ ID NO: 41222 - protein, 122 aa, Artificial Sequence
  Chemically Synthesized
QVQLQESGGGLVQAGGSLRLSCAASGYISRFFGMGWYRQAPGKERELVATITSGTTTYYADSVKGRFTISRDNAKNTVYLQMNSLKPEDTAVYYCAVRLLDLSTGVLLHNYWGQGTQVTVSS

SEQ ID NO: 41223 - protein, 122 aa, Artificial Sequence
  Chemically Synthesized
QVQLQESGGGLVQAGGSLRLSCAASGSIFGYNTMGWYRQAPGKERELVATINRGTNTNYADSVKGRFTISRDNAKNTVYLQMNSLKPEDTAVYYCAAPQHAYFPQRGGLYYWGQGTQVTVSS

SEQ ID NO: 41224 - protein, 122 aa, Artificial Sequence
  Chemically Synthesized
QVQLQESGGGLVQAGGSLRLSCAASGTIFSRRYMGWYRQAPGKEREFVASINFGATTNYADSVKGRFTISRDNAKNTVYLQMNSLKPEDTAVYYCAVSGFPYSARTYFLSYWGQGTQVTVSS

SEQ ID NO: 41225 - protein, 126 aa, Artificial Sequence
  Chemically Synthesized
QVQLQESGGGLVQAGGSLRLSCAASGYISFADYMGWYRQAPGKEREFVATITLGSNTYYADSVKGRFTISRDNAKNTVYLQMNSLKPEDTAVYYCALRVDGTQDDGAPRETVLPYWGQGTQVTVSS

SEQ ID NO: 41226 - protein, 118 aa, Artificial Sequence
  Chemically Synthesized
QVQLQESGGGLVQAGGSLRLSCAASGTIFAYVSMGWYRQAPGKEREFVAAIGSGGNTNYADSVKGRFTISRDNAKNTVYLQMNSLKPEDTAVYYCAVPRFHYRYFVYWGQGTQVTVSS

SEQ ID NO: 41227 - protein, 117 aa, Artificial Sequence
  Chemically Synthesized
QVQLQESGGGLVQAGGSLRLSCAASGSISVGAAMGWYRQAPGKERELVAGIAEGGNTNYADSVKGRFTISRDNAKNTVYLQMNSLKPEDTAVYYCAVVCTTSTVMYWGQGTQVTVSS

SEQ ID NO: 41228 - protein, 125 aa, Artificial Sequence
  Chemically Synthesized
QVQLQESGGGLVQAGGSLRLSCAASGYIFYGFEMGWYRQAPGKEREFVASIDEGSNTNYADSVKGRFTISRDNAKNTVYLQMNSLKPEDTAVYYCAVGYGGGWRAYSNGAYTYYWGQGTQVTVSS

SEQ ID NO: 41229 - protein, 118 aa, Artificial Sequence
  Chemically Synthesized
QVQLQESGGGLVQAGGSLRLSCAASGSISGYDTMGWYRQAPGKEREFVAAIGIGGTTYYADSVKGRFTISRDNAKNTVYLQMNSLKPEDTAVYYCAVRYGRYRFHRYWGQGTQVTVSS

SEQ ID NO: 41230 - protein, 112 aa, Artificial Sequence
  Chemically Synthesized
QVQLQESGGGLVQAGGSLRLSCAASGYISYTNRMGWYRQAPGKERELAYADSVKGRFTISRDNAKNTVYLQMNSLKPEDTAVYYCAVLHRNGLGGSDDHGYWGQGTQVTVSS

SEQ ID NO: 41231 - protein, 122 aa, Artificial Sequence
  Chemically Synthesized
QVQLQESGGGLVQAGGSLRLSCAASGNIFYTPFMGWYRQAPGKEREFVASIGYGTSTNYADSVKGRFTISRDNAKNTVYLQMNSLKPEDTAVYYCAARGTPYQVAAGYYSYWGQGTQVTVSS

SEQ ID NO: 41232 - protein, 126 aa, Artificial Sequence
  Chemically Synthesized
QVQLQESGGGLVQAGGSLRLSCAASGNISGRRTMGWYRQAPGKERELVAAIASGAITNYADSVKGRFTISRDNAKNTVYLQMNSLKPEDTAVYYCAAYQDWRDVADSDQQGDHYYWGQGTQVTVSS

SEQ ID NO: 41233 - protein, 126 aa, Artificial Sequence
  Chemically Synthesized
QVQLQESGGGLVQAGGSLRLSCAASGNISRYPQMGWYRQAPGKERELVAGIAGGGTTYYADSVKGRFTISRDNAKNTVYLQMNSLKPEDTAVYYCAARGPYENFYWGERIYKYRYWGQGTQVTVSS

SEQ ID NO: 41234 - protein, 118 aa, Artificial Sequence
  Chemically Synthesized
QVQLQESGGGLVQAGGSLRLSCAASGYIFYYVSMGWYRQAPGKEREFVASISIGGSTYYADSVKGRFTISRDNAKNTVYLQMNSLKPEDTAVYYCAANRRDRFHHGYWGQGTQVTVSS

SEQ ID NO: 41235 - protein, 118 aa, Artificial Sequence
  Chemically Synthesized
QVQLQESGGGLVQAGGSLRLSCAASGTIFDVSRMGWYRQAPGKERELVAAIDYGANTYYADSVKGRFTISRDNAKNTVYLQMNSLKPEDTAVYYCAVYYTGGHRFVYWGQGTQVTVSS

SEQ ID NO: 41236 - protein, 121 aa, Artificial Sequence
  Chemically Synthesized
QVQLQESGGGLVQAGGSLRLSCAASGSISYDYDMGWYRQAPGKERELVATISAGSNTYYADSVKGRFTISRDNAKNTVYLQMNSLKPEDTAVYYCAAYLSRLFLRWTTIYWGQGTQVTVSS

SEQ ID NO: 41237 - protein, 111 aa, Artificial Sequence
  Chemically Synthesized
QVQLQESGGGLVQAGGSLRLSCAASGYISQYDYMGWYRQAPGKEREFVASIGRGGTTYYADSVKGRFTISRDNAKNTVYLQMNSLKPEDTAVYYCAAHAYWGQGTQVTVSS

SEQ ID NO: 41238 - protein, 118 aa, Artificial Sequence
  Chemically Synthesized
QVQLQESGGGLVQAGGSLRLSCAASGYISRSKYMGWYRQAPGKEREFVAAIGYGATTNYADSVKGRFTISRDNAKNTVYLQMNSLKPEDTAVYYCAARVYRPIRYRYWGQGTQVTVSS

SEQ ID NO: 41239 - protein, 118 aa, Artificial Sequence
  Chemically Synthesized
QVQLQESGGGLVQAGGSLRLSCAASGSISYVGKMGWYRQAPGKERELVAAIGVGASTNYADSVKGRFTISRDNAKNTVYLQMNSLKPEDTAVYYCAVRIRRVHYHYYWGQGTQVTVSS

SEQ ID NO: 41240 - protein, 118 aa, Artificial Sequence
  Chemically Synthesized
QVQLQESGGGLVQAGGSLRLSCAASGSISSNYLMGWYRQAPGKERELVAAISTGASTYYADSVKGRFTISRDNAKNTVYLQMNSLKPEDTAVYYCAVWYAYLRSHSYWGQGTQVTVSS

SEQ ID NO: 41241 - protein, 118 aa, Artificial Sequence
  Chemically Synthesized
QVQLQESGGGLVQAGGSLRLSCAASGYISPAYSMGWYRQAPGKEREFVAGIDYGATTYYADSVKGRFTISRDNAKNTVYLQMNSLKPEDTAVYYCAAYRVDADYHYYWGQGTQVTVSS

SEQ ID NO: 41242 - protein, 118 aa, Artificial Sequence
  Chemically Synthesized
QVQLQESGGGLVQAGGSLRLSCAASGNIFWRKTMGWYRQAPGKERELVATITYGTITYYADSVKGRFTISRDNAKNTVYLQMNSLKPEDTAVYYCAARRRGIWYHGYWGQGTQVTVSS

SEQ ID NO: 41243 - protein, 118 aa, Artificial Sequence
  Chemically Synthesized
QVQLQESGGGLVQAGGSLRLSCAASGYISVVTLMGWYRQAPGKERELVAAISIGGNTNYADSVKGRFTISRDNAKNTVYLQMNSLKPEDTAVYYCAVASKYEQVLQYWGQGTQVTVSS

SEQ ID NO: 41244 - protein, 126 aa, Artificial Sequence
  Chemically Synthesized
QVQLQESGGGLVQAGGSLRLSCAASGSIFPAYTMGWYRQAPGKERELVAAITSGAITYYADSVKGRFTISRDNAKNTVYLQMNSLKPEDTAVYYCAVGYSPYWVPLRYWRRGHDYWGQGTQVTVSS

SEQ ID NO: 41245 - protein, 117 aa, Artificial Sequence
  Chemically Synthesized
QVQLQESGGGLVQAGGSLRLSCAASGSISQYDMGWYRQAPGKERELVATIATGTNTYYADSVKGRFTISRDNAKNTVYLQMNSLKPEDTAVYYCAAWDGGRTSYEYWGQGTQVTVSS

SEQ ID NO: 41246 - protein, 118 aa, Artificial Sequence
  Chemically Synthesized
QVQLQESGGGLVQAGGSLRLSCAASGSIFFVDDMGWYRQAPGKERELVATINYGTITYYADSVKGRFTISRDNAKNTVYLQMNSLKPEDTAVYYCAVDGAFPLPHFYWGQGTQVTVSS

SEQ ID NO: 41247 - protein, 122 aa, Artificial Sequence
  Chemically Synthesized
QVQLQESGGGLVQAGGSLRLSCAASGSIFYVWSMGWYRQAPGKERELVAGITRGAITYYADSVKGRFTISRDNAKNTVYLQMNSLKPEDTAVYYCAVWLLYDLDAIDIHTYWGQGTQVTVSS

SEQ ID NO: 41248 - protein, 118 aa, Artificial Sequence
  Chemically Synthesized
QVQLQESGGGLVQAGGSLRLSCAASGSISILITMGWYRQAPGKERELVAGINAGGITYYADSVKGRFTISRDNAKNTVYLQMNSLKPEDTAVYYCAVYLSWDGFHDYWGQGTQVTVSS

SEQ ID NO: 41249 - protein, 126 aa, Artificial Sequence
  Chemically Synthesized
QVQLQESGGGLVQAGGSLRLSCAASGSISSSTVMGWYRQAPGKERELVASIGIGGTTYYADSVKGRFTISRDNAKNTVYLQMNSLKPEDTAVYYCAAGDYDSTPYDAEQGDVHLYWGQGTQVTVSS

SEQ ID NO: 41250 - protein, 122 aa, Artificial Sequence
  Chemically Synthesized
QVQLQESGGGLVQAGGSLRLSCAASGSISSVYYMGWYRQAPGKEREFVASIGVGTNTYYADSVKGRFTISRDNAKNTVYLQMNSLKPEDTAVYYCAVIHRWRGNSYRWHRYWGQGTQVTVSS

SEQ ID NO: 41251 - protein, 117 aa, Artificial Sequence
  Chemically Synthesized
QVQLQESGGGLVQAGGSLRLSCAASGNIFSPLFMGWYRQAPGKERELVAGIGGGNTNYADSVKGRFTISRDNAKNTVYLQMNSLKPEDTAVYYCAARYWYNYRYTYWGQGTQVTVSS

SEQ ID NO: 41252 - protein, 122 aa, Artificial Sequence
  Chemically Synthesized
QVQLQESGGGLVQAGGSLRLSCAASGSIFYDRYMGWYRQAPGKERELVASIAAGSITNYADSVKGRFTISRDNAKNTVYLQMNSLKPEDTAVYYCAAYNSNAPQDTNGHAYWGQGTQVTVSS

SEQ ID NO: 41253 - protein, 118 aa, Artificial Sequence
  Chemically Synthesized
QVQLQESGGGLVQAGGSLRLSCAASGNISFRYFMGWYRQAPGKEREFVASIDYGANTYYADSVKGRFTISRDNAKNTVYLQMNSLKPEDTAVYYCAAWEYSDAGYAYWGQGTQVTVSS

SEQ ID NO: 41254 - protein, 122 aa, Artificial Sequence
  Chemically Synthesized
QVQLQESGGGLVQAGGSLRLSCAASGYISYRRVMGWYRQAPGKEREFVAAIGGGGTTNYADSVKGRFTISRDNAKNTVYLQMNSLKPEDTAVYYCAVGSRYPTFGRYPLWYWGQGTQVTVSS

SEQ ID NO: 41255 - protein, 117 aa, Artificial Sequence
  Chemically Synthesized
QVQLQESGGGLVQAGGSLRLSCAASGYIFSEYTMGWYRQAPGKEREFVATISGGSNTYYADSVKGRFTISRDNAKNTVYLQMNSLKPEDTAVYYCAAWSTSVTTMYWGQGTQVTVSS

SEQ ID NO: 41256 - protein, 118 aa, Artificial Sequence
  Chemically Synthesized
QVQLQESGGGLVQAGGSLRLSCAASGNIFGERDMGWYRQAPGKEREFVASIATGASTNYADSVKGRFTISRDNAKNTVYLQMNSLKPEDTAVYYCAAAYTDLRPYVYWGQGTQVTVSS

SEQ ID NO: 41257 - protein, 126 aa, Artificial Sequence
  Chemically Synthesized
QVQLQESGGGLVQAGGSLRLSCAASGTIFSDPKMGWYRQAPGKEREFVATINDGANTNYADSVKGRFTISRDNAKNTVYLQMNSLKPEDTAVYYCAALQFASPAEGGYRRYTFPYWGQGTQVTVSS

SEQ ID NO: 41258 - protein, 125 aa, Artificial Sequence
  Chemically Synthesized
QVQLQESGGGLVQAGGSLRLSCAASGTISDFDYMGWYRQAPGKERELVAAITGGTTYYADSVKGRFTISRDNAKNTVYLQMNSLKPEDTAVYYCAVFGKRYFEWLSTALRDHYYWGQGTQVTVSS

SEQ ID NO: 41259 - protein, 119 aa, Artificial Sequence
  Chemically Synthesized
QVQLQESGGGLVQAGGSLRLSCAASGTIFPGAAMGWYRQAPGKEREFVAGISWGANTYYADSVKGRFTISRDNAKNTVYLQMNSLKPEDTAVYYCAASSHDDVRVYYYWGQGTQVTVSS

SEQ ID NO: 41260 - protein, 122 aa, Artificial Sequence
  Chemically Synthesized
QVQLQESGGGLVQAGGSLRLSCAASGSISRGSAMGWYRQAPGKERELVAGIARGASTNYADSVKGRFTISRDNAKNTVYLQMNSLKPEDTAVYYCAAIAYVGDTTGYYHGYWGQGTQVTVSS

SEQ ID NO: 41261 - protein, 126 aa, Artificial Sequence
  Chemically Synthesized
QVQLQESGGGLVQAGGSLRLSCAASGTISQLRAMGWYRQAPGKEREFVAGIGYGGSTYYADSVKGRFTISRDNAKNTVYLQMNSLKPEDTAVYYCAANARSRTSNDQRPSGYHFYWGQGTQVTVSS

SEQ ID NO: 41262 - protein, 117 aa, Artificial Sequence
  Chemically Synthesized
QVQLQESGGGLVQAGGSLRLSCAASGNIFTPWMGWYRQAPGKERELVATIAFGASTYYADSVKGRFTISRDNAKNTVYLQMNSLKPEDTAVYYCAVVGNASQYLQYWGQGTQVTVSS

SEQ ID NO: 41263 - protein, 118 aa, Artificial Sequence
  Chemically Synthesized
QVQLQESGGGLVQAGGSLRLSCAASGSISAYIYMGWYRQAPGKEREFVATIGRGGNTNYADSVKGRFTISRDNAKNTVYLQMNSLKPEDTAVYYCAVNRTYYRWYRYWGQGTQVTVSS

SEQ ID NO: 41264 - protein, 122 aa, Artificial Sequence
  Chemically Synthesized
QVQLQESGGGLVQAGGSLRLSCAASGSISDDPTMGWYRQAPGKEREFVAGIGTGGITYYADSVKGRFTISRDNAKNTVYLQMNSLKPEDTAVYYCAVSVSYLYYRAYRYIYWGQGTQVTVSS

SEQ ID NO: 41265 - protein, 114 aa, Artificial Sequence
  Chemically Synthesized
QVQLQESGGGLVQAGGSLRLSCAASGYIFPILLMGWYRQAPGKERELVANYADSVKGRFTISRDNAKNTVYLQMNSLKPEDTAVYYCAAAKAYVASLLASAWYWGQGTQVTVSS

SEQ ID NO: 41266 - protein, 118 aa, Artificial Sequence
  Chemically Synthesized
QVQLQESGGGLVQAGGSLRLSCAASGYISQDLFMGWYRQAPGKEREFVAAIDSGGTTYYADSVKGRFTISRDNAKNTVYLQMNSLKPEDTAVYYCAAQKGVTYDYYYWGQGTQVTVSS

SEQ ID NO: 41267 - protein, 122 aa, Artificial Sequence
  Chemically Synthesized
QVQLQESGGGLVQAGGSLRLSCAASGSISRWAGMGWYRQAPGKERELVAGITYGSSTYYADSVKGRFTISRDNAKNTVYLQMNSLKPEDTAVYYCAAVYGGRNYTRGYHGYWGQGTQVTVSS

SEQ ID NO: 41268 - protein, 121 aa, Artificial Sequence
  Chemically Synthesized
QVQLQESGGGLVQAGGSLRLSCAASGNISDRYYMGWYRQAPGKERELVASITAVVVPYADSVKGRFTISRDNAKNTVYLQMNSLKPEDTAVYYCAVEIDTAALVYTYLGYWGQGTQVTVSS

SEQ ID NO: 41269 - protein, 121 aa, Artificial Sequence
  Chemically Synthesized
QVQLQESGGGLVQAGGSLRLSCAASGTISFKYDMGWYRQAPGKERELVATIANGTTTYYADSVKGRFTISRDNAKNTVYLQMNSLKPEDTAVYYCAAVLTLFTLLTISLYWGQGTQVTVSS

SEQ ID NO: 41270 - protein, 122 aa, Artificial Sequence
  Chemically Synthesized
QVQLQESGGGLVQAGGSLRLSCAASGTIFGFTSMGWYRQAPGKERELVAGIARGGTTYYADSVKGRFTISRDNAKNTVYLQMNSLKPEDTAVYYCAVNLYRSLYAVYGYGYWGQGTQVTVSS

SEQ ID NO: 41271 - protein, 118 aa, Artificial Sequence
  Chemically Synthesized
QVQLQESGGGLVQAGGSLRLSCAASGTISYAYSMGWYRQAPGKEREFVAGITRGGSTYYADSVKGRFTISRDNAKNTVYLQMNSLKPEDTAVYYCAVRAYRTYRFTYWGQGTQVTVSS

SEQ ID NO: 41272 - protein, 122 aa, Artificial Sequence
  Chemically Synthesized
QVQLQESGGGLVQAGGSLRLSCAASGTISYRYAMGWYRQAPGKERELVAAISQGGSTYYADSVKGRFTISRDNAKNTVYLQMNSLKPEDTAVYYCAAAVSRWRYYGGSLVYWGQGTQVTVSS

SEQ ID NO: 41273 - protein, 126 aa, Artificial Sequence
  Chemically Synthesized
QVQLQESGGGLVQAGGSLRLSCAASGNIFNYYPMGWYRQAPGKERELVASIDYGTNTQYADSVKGRFTISRDNAKNTVYLQMNSLKPEDTAVYYCAAATDPVTTNYYAKQGGHNYWGQGTQVTVSS

SEQ ID NO: 41274 - protein, 118 aa, Artificial Sequence
  Chemically Synthesized
QVQLQESGGGLVQAGGSLRLSCAASGNISSEGYMGWYRQAPGKERELVATINYGSITNYADSVKGRFTISRDNAKNTVYLQMNSLKPEDTAVYYCAADVNDGYNLQYWGQGTQVTVSS

SEQ ID NO: 41275 - protein, 122 aa, Artificial Sequence
  Chemically Synthesized
QVQLQESGGGLVQAGGSLRLSCAASGSISAYNGMGWYRQAPGKERELVAAIATGSTTYYADSVKGRFTISRDNAKNTVYLQMNSLKPEDTAVYYCAVVVSRHSSYPSYLGYWGQGTQVTVSS

SEQ ID NO: 41276 - protein, 126 aa, Artificial Sequence
  Chemically Synthesized
QVQLQESGGGLVQAGGSLRLSCAASGTIFDAFYMGWYRQAPGKERELVAGIAKGSITYYADSVKGRFTISRDNAKNTVYLQMNSLKPEDTAVYYCAATGPNGFGWEQLSRADYRYWGQGTQVTVSS

SEQ ID NO: 41277 - protein, 118 aa, Artificial Sequence
  Chemically Synthesized
QVQLQESGGGLVQAGGSLRLSCAASGYISRRATMGWYRQAPGKEREFVAGITNGTNTYYADSVKGRFTISRDNAKNTVYLQMNSLKPEDTAVYYCAARSWYTWVHRYWGQGTQVTVSS

SEQ ID NO: 41278 - protein, 109 aa, Artificial Sequence
  Chemically Synthesized
QVQLQESGGGLVQAGGSLRLSCAASGYISTGESMGWYRQAPGKEREFVASIGPGGTTYYADSVKGRFTISRDNAKNTVYLQMNSLKPEDTAVYYCAYYWGQGTQVTVSS

SEQ ID NO: 41279 - protein, 118 aa, Artificial Sequence
  Chemically Synthesized
QVQLQESGGGLVQAGGSLRLSCAASGNISGRQVMGWYRQAPGKEREFVAGINYGSNTNYADSVKGRFTISRDNAKNTVYLQMNSLKPEDTAVYYCAVVDYSQSRFYYWGQGTQVTVSS

SEQ ID NO: 41280 - protein, 118 aa, Artificial Sequence
  Chemically Synthesized
QVQLQESGGGLVQAGGSLRLSCAASGTIFEGFAMGWYRQAPGKERELVASIGYGAITYYADSVKGRFTISRDNAKNTVYLQMNSLKPEDTAVYYCAVPYTYRVPFSYWGQGTQVTVSS

SEQ ID NO: 41281 - protein, 121 aa, Artificial Sequence
  Chemically Synthesized
QVQLQESGGGLVQAGGSLRLSCAASGYIFDSSDMGWYRQAPGKERELVASIDSVVVPYADSVKGRFTISRDNAKNTVYLQMNSLKPEDTAVYYCAVGGRAHYVSPDYYWYWGQGTQVTVSS

SEQ ID NO: 41282 - protein, 126 aa, Artificial Sequence
  Chemically Synthesized
QVQLQESGGGLVQAGGSLRLSCAASGNIFYRDYMGWYRQAPGKEREFVASIGVGGITYYADSVKGRFTISRDNAKNTVYLQMNSLKPEDTAVYYCAVKRAPPYYGWVYRNRYLGYWGQGTQVTVSS

SEQ ID NO: 41283 - protein, 117 aa, Artificial Sequence
  Chemically Synthesized
QVQLQESGGGLVQAGGSLRLSCAASGYISDTQGMGWYRQAPGKEREFVATIALGSITYYADSVKGRFTISRDNAKNTVYLQMNSLKPEDTAVYYCAASRYYLQGLYWGQGTQVTVSS

SEQ ID NO: 41284 - protein, 114 aa, Artificial Sequence
  Chemically Synthesized
QVQLQESGGGLVQAGGSLRLSCAASGYIFRPRIMGWYRQAPGKEREFVAAIAFGGITYYADSVKGRFTISRDNAKNTVYLQMNSLKPEDTAVYYCAATRYHLYWGQGTQVTVSS

SEQ ID NO: 41285 - protein, 122 aa, Artificial Sequence
  Chemically Synthesized
QVQLQESGGGLVQAGGSLRLSCAASGTISWRSLMGWYRQAPGKERELVATIAHGTSTNYADSVKGRFTISRDNAKNTVYLQMNSLKPEDTAVYYCAARGTGDYSFRRYHYYWGQGTQVTVSS

SEQ ID NO: 41286 - protein, 121 aa, Artificial Sequence
  Chemically Synthesized
QVQLQESGGGLVQAGGSLRLSCAASGYIWLPVMGWYRQAPGKEREFVASITAGSTTYYADSVKGRFTISRDNAKNTVYLQMNSLKPEDTAVYYCAARGANYHVNLAYFRYWGQGTQVTVSS

SEQ ID NO: 41287 - protein, 121 aa, Artificial Sequence
  Chemically Synthesized
QVQLQESGGGLVQAGGSLRLSCAASGSIFSVFSMGWYRQAPGKEREFVAGISYGTTTNYADSVKGRFTISRDNAKNTVYLQMNSLKPEDTAVYYCAVTYTDPAWFLWTIYWGQGTQVTVSS

SEQ ID NO: 41288 - protein, 118 aa, Artificial Sequence
  Chemically Synthesized
QVQLQESGGGLVQAGGSLRLSCAASGTIFYPPIMGWYRQAPGKEREFVAAIGGGGNTNYADSVKGRFTISRDNAKNTVYLQMNSLKPEDTAVYYCAALRYRRDFFGYWGQGTQVTVSS

SEQ ID NO: 41289 - protein, 122 aa, Artificial Sequence
  Chemically Synthesized
QVQLQESGGGLVQAGGSLRLSCAASGNIFRLRGMGWYRQAPGKEREFVAAITQGASTYYADSVKGRFTISRDNAKNTVYLQMNSLKPEDTAVYYCAVRGYAPPIYYRFYQYWGQGTQVTVSS

SEQ ID NO: 41290 - protein, 118 aa, Artificial Sequence
  Chemically Synthesized
QVQLQESGGGLVQAGGSLRLSCAASGSISLVLYMGWYRQAPGKEREFVAAISSGTSTYYADSVKGRFTISRDNAKNTVYLQMNSLKPEDTAVYYCAAKTWYRGAYRYWGQGTQVTVSS

SEQ ID NO: 41291 - protein, 115 aa, Artificial Sequence
  Chemically Synthesized
QVQLQESGGGLVQAGGSLRLSCAASGNIFLYTYMGWYRQAPGKERELVAAITWGAITYYADSVKGRFTISRDNAKNTVYLQMNSLKPEDTAVYYCASTWRRYGYWGQGTQVTVSS

SEQ ID NO: 41292 - protein, 122 aa, Artificial Sequence
  Chemically Synthesized
QVQLQESGGGLVQAGGSLRLSCAASGTIFDTVGMGWYRQAPGKERELVAGITLGTITYYADSVKGRFTISRDNAKNTVYLQMNSLKPEDTAVYYCAVVTLYRSQYYFYHGYWGQGTQVTVSS

SEQ ID NO: 41293 - protein, 117 aa, Artificial Sequence
  Chemically Synthesized
QVQLQESGGGLVQAGGSLRLSCAASGSIFASPDMGWYRQAPGKERELVAGIDYGGNTYYADSVKGRFTISRDNAKNTVYLQMNSLKPEDTAVYYCAVTWPNSVTMYWGQGTQVTVSS

SEQ ID NO: 41294 - protein, 123 aa, Artificial Sequence
  Chemically Synthesized
QVQLQESGGGLVQAGGSLRLSCAASGTISYGLDMGWYRQAPGKEREFVAGIGQDGTSTYYADSVKGRFTISRDNAKNTVYLQMNSLKPEDTAVYYCAAYVLFRARQYYAHYYWGQGTQVTVSS

SEQ ID NO: 41295 - protein, 126 aa, Artificial Sequence
  Chemically Synthesized
QVQLQESGGGLVQAGGSLRLSCAASGNISGDGYMGWYRQAPGKERELVASITGGASTNYADSVKGRFTISRDNAKNTVYLQMNSLKPEDTAVYYCAAVPYDYGYYRAKYYDSLHYWGQGTQVTVSS

SEQ ID NO: 41296 - protein, 118 aa, Artificial Sequence
  Chemically Synthesized
QVQLQESGGGLVQAGGSLRLSCAASGTISPYDTMGWYRQAPGKERELVAGITRGTNTNYADSVKGRFTISRDNAKNTVYLQMNSLKPEDTAVYYCAVSVNYDDRYGYWGQGTQVTVSS

SEQ ID NO: 41297 - protein, 122 aa, Artificial Sequence
  Chemically Synthesized
QVQLQESGGGLVQAGGSLRLSCAASGYIFYYQVMGWYRQAPGKERELVAAINTGSTTYYADSVKGRFTISRDNAKNTVYLQMNSLKPEDTAVYYCAVIRRGKSRDVSYYGYWGQGTQVTVSS

SEQ ID NO: 41298 - protein, 118 aa, Artificial Sequence
  Chemically Synthesized
QVQLQESGGGLVQAGGSLRLSCAASGTISPSLYMGWYRQAPGKERELVASIGFGTTTYYADSVKGRFTISRDNAKNTVYLQMNSLKPEDTAVYYCAAVYYYAGELHYWGQGTQVTVSS

SEQ ID NO: 41299 - protein, 118 aa, Artificial Sequence
  Chemically Synthesized
QVQLQESGGGLVQAGGSLRLSCAASGYISDSYYMGWYRQAPGKERELVATINGGANTNYADSVKGRFTISRDNAKNTVYLQMNSLKPEDTAVYYCAVGYLLKDTHWYWGQGTQVTVSS

SEQ ID NO: 41300 - protein, 118 aa, Artificial Sequence
  Chemically Synthesized
QVQLQESGGGLVQAGGSLRLSCAASGTISPEPYMGWYRQAPGKEREFVAAISYGTITYYADSVKGRFTISRDNAKNTVYLQMNSLKPEDTAVYYCAADTQGYDQLQYWGQGTQVTVSS

SEQ ID NO: 41301 - protein, 118 aa, Artificial Sequence
  Chemically Synthesized
QVQLQESGGGLVQAGGSLRLSCAASGYISKREFMGWYRQAPGKEREFVASIGDGTNTYYADSVKGRFTISRDNAKNTVYLQMNSLKPEDTAVYYCAATHRIRRWLTYWGQGTQVTVSS

SEQ ID NO: 41302 - protein, 119 aa, Artificial Sequence
  Chemically Synthesized
QVQLQESGGGLVQAGGSLRLSCAASGYISFAYYYMGWYRQAPGKEREFVAGINRGGTTYYADSVKGRFTISRDNAKNTVYLQMNSLKPEDTAVYYCAVRTFFLRYYRYWGQGTQVTVSS

SEQ ID NO: 41303 - protein, 126 aa, Artificial Sequence
  Chemically Synthesized
QVQLQESGGGLVQAGGSLRLSCAASGYIFGGAVMGWYRQAPGKEREFVAGIARGGTTYYADSVKGRFTISRDNAKNTVYLQMNSLKPEDTAVYYCAVLYYLDGYYDDGDGGYLGYWGQGTQVTVSS

SEQ ID NO: 41304 - protein, 118 aa, Artificial Sequence
  Chemically Synthesized
QVQLQESGGGLVQAGGSLRLSCAASGTISTLRPMGWYRQAPGKEREFVATISQGSNTNYADSVKGRFTISRDNAKNTVYLQMNSLKPEDTAVYYCAADVWDPGQFTYWGQGTQVTVSS

SEQ ID NO: 41305 - protein, 118 aa, Artificial Sequence
  Chemically Synthesized
QVQLQESGGGLVQAGGSLRLSCAASGNIFGRLVMGWYRQAPGKERELVAGIAEGGTTYYADSVKGRFTISRDNAKNTVYLQMNSLKPEDTAVYYCAVAIRAYATYYYWGQGTQVTVSS

SEQ ID NO: 41306 - protein, 117 aa, Artificial Sequence
  Chemically Synthesized
QVQLQESGGGLVQAGGSLRLSCAASGSIFYDGVMGWYRQAPGKEREFVATINDGSSTNYADSVKGRFTISRDNAKNTVYLQMNSLKPEDTAVYYCAARYGSETTFYWGQGTQVTVSS

SEQ ID NO: 41307 - protein, 126 aa, Artificial Sequence
  Chemically Synthesized
QVQLQESGGGLVQAGGSLRLSCAASGNIFVPPFMGWYRQAPGKEREFVATIGVGGSTYYADSVKGRFTISRDNAKNTVYLQMNSLKPEDTAVYYCAVSPWYVYRTHLYNRQQHLYWGQGTQVTVSS

SEQ ID NO: 41308 - protein, 118 aa, Artificial Sequence
  Chemically Synthesized
QVQLQESGGGLVQAGGSLRLSCAASGYISTRRWMGWYRQAPGKERELVATIDGGGITNYADSVKGRFTISRDNAKNTVYLQMNSLKPEDTAVYYCAVYVRRFYRYGYWGQGTQVTVSS

SEQ ID NO: 41309 - protein, 118 aa, Artificial Sequence
  Chemically Synthesized
QVQLQESGGGLVQAGGSLRLSCAASGTIFTGGAMGWYRQAPGKEREFVAGIGYGGTTNYADSVKGRFTISRDNAKNTVYLQMNSLKPEDTAVYYCAVAYYVPYRHGYWGQGTQVTVSS

SEQ ID NO: 41310 - protein, 117 aa, Artificial Sequence
  Chemically Synthesized
QVQLQESGGGLVQAGGSLRLSCAASGTIFRWTPMGWYRQAPGKEREFVASISYGASTYYADSVKGRFTISRDNAKNTVYLQMNSLKPEDTAVYYCAAPPWKVRVRYWGQGTQVTVSS

SEQ ID NO: 41311 - protein, 118 aa, Artificial Sequence
  Chemically Synthesized
QVQLQESGGGLVQAGGSLRLSCAASGTISRAPYMGWYRQAPGKERELVAAIGYGGTTYYADSVKGRFTISRDNAKNTVYLQMNSLKPEDTAVYYCAVVYYWRARFNYWGQGTQVTVSS

SEQ ID NO: 41312 - protein, 122 aa, Artificial Sequence
  Chemically Synthesized
QVQLQESGGGLVQAGGSLRLSCAASGYISWKDDMGWYRQAPGKERELVAGIDGGGNTNYADSVKGRFTISRDNAKNTVYLQMNSLKPEDTAVYYCAADLTPANRYLDYYQYWGQGTQVTVSS

SEQ ID NO: 41313 - protein, 122 aa, Artificial Sequence
  Chemically Synthesized
QVQLQESGGGLVQAGGSLRLSCAASGNISPGYRMGWYRQAPGKEREFVASIATGTTTYYADSVKGRFTISRDNAKNTVYLQMNSLKPEDTAVYYCAARYAYYSYYNRYHRYWGQGTQVTVSS

SEQ ID NO: 41314 - protein, 123 aa, Artificial Sequence
  Chemically Synthesized
QVQLQESGGGLVQAGGSLRLSCAASGSIFRSRRMGWYRQAPGKERELVAAITYGATTYYADSVKGRFTISRDNAKNTVYLQMNSLKPEDTAVYYCAVIYRGYVPYGIRKHYYWGQGTQVTVSS

SEQ ID NO: 41315 - protein, 126 aa, Artificial Sequence
  Chemically Synthesized
QVQLQESGGGLVQAGGSLRLSCAASGYISDNTWMGWYRQAPGKEREFVATIGGGGSTYYADSVKGRFTISRDNAKNTVYLQMNSLKPEDTAVYYCAVYYDDGKDWYTGGLTDHYYWGQGTQVTVSS

SEQ ID NO: 41316 - protein, 122 aa, Artificial Sequence
  Chemically Synthesized
QVQLQESGGGLVQAGGSLRLSCAASGTISGVPYMGWYRQAPGKERELVASISSGSTTYYADSVKGRFTISRDNAKNTVYLQMNSLKPEDTAVYYCAAKWVGLSLLWHPLYYWGQGTQVTVSS

SEQ ID NO: 41317 - protein, 116 aa, Artificial Sequence
  Chemically Synthesized
QVQLQESGGGLVQAGGSLRLSCAASGNISVAAGMGWYRQAPGKERELVAAIGRGGTSTYYADSVKGRFTISRDNAKNTVYLQMNSLKPEDTAVYYCAAVIAQYGYWGQGTQVTVSS

SEQ ID NO: 41318 - protein, 122 aa, Artificial Sequence
  Chemically Synthesized
QVQLQESGGGLVQAGGSLRLSCAASGTISLYYSMGWYRQAPGKEREFVAAIAFGGSTNYADSVKGRFTISRDNAKNTVYLQMNSLKPEDTAVYYCAAYLIIEDPPPYDHDYWGQGTQVTVSS

SEQ ID NO: 41319 - protein, 122 aa, Artificial Sequence
  Chemically Synthesized
QVQLQESGGGLVQAGGSLRLSCAASGYISRRDYMGWYRQAPGKERELVASITRGGITNYADSVKGRFTISRDNAKNTVYLQMNSLKPEDTAVYYCAVGRPSYFGIVRTHAYWGQGTQVTVSS

SEQ ID NO: 41320 - protein, 118 aa, Artificial Sequence
  Chemically Synthesized
QVQLQESGGGLVQAGGSLRLSCAASGNIFFLSIMGWYRQAPGKERELVAAINRGATTNYADSVKGRFTISRDNAKNTVYLQMNSLKPEDTAVYYCAVRYTYFRAHWYWGQGTQVTVSS

SEQ ID NO: 41321 - protein, 122 aa, Artificial Sequence
  Chemically Synthesized
QVQLQESGGGLVQAGGSLRLSCAASGTIFYGYTMGWYRQAPGKEREFVASISRGGNTNYADSVKGRFTISRDNAKNTVYLQMNSLKPEDTAVYYCAARTRILGWGYYWHGYWGQGTQVTVSS

SEQ ID NO: 41322 - protein, 121 aa, Artificial Sequence
  Chemically Synthesized
QVQLQESGGGLVQAGGSLRLSCAASGYISSSRYMGWYRQAPGKERELLRTTTYYADSVKGRFTISRDNAKNTVYLQMNSLKPEDTAVYYCAASLTHVDYGSYYHVYDYDYWGQGTQVTVSS

SEQ ID NO: 41323 - protein, 122 aa, Artificial Sequence
  Chemically Synthesized
QVQLQESGGGLVQAGGSLRLSCAASGTISVGTYMGWYRQAPGKERELVAAINNGTTTYYADSVKGRFTISRDNAKNTVYLQMNSLKPEDTAVYYCAVGDWYFDPAWRDYDYWGQGTQVTVSS

SEQ ID NO: 41324 - protein, 123 aa, Artificial Sequence
  Chemically Synthesized
QVQLQESGGGLVQAGGSLRLSCAASGNISYPYRMGWYRQAPGKEREFVASIAYGSTTYYADSVKGRFTISRDNAKNTVYLQMNSLKPEDTAVYYCAALRNRRQSDYAPFRRYWGQGTQVTVSS

SEQ ID NO: 41325 - protein, 122 aa, Artificial Sequence
  Chemically Synthesized
QVQLQESGGGLVQAGGSLRLSCAASGNISVHIAMGWYRQAPGKERELVAAITAGGTTYYADSVKGRFTISRDNAKNTVYLQMNSLKPEDTAVYYCAATYRPGRDVDRYYGYWGQGTQVTVSS

SEQ ID NO: 41326 - protein, 118 aa, Artificial Sequence
  Chemically Synthesized
QVQLQESGGGLVQAGGSLRLSCAASGYIFVSLGMGWYRQAPGKERELVASISTGSITNYADSVKGRFTISRDNAKNTVYLQMNSLKPEDTAVYYCAVGLDVGYHLYYWGQGTQVTVSS

SEQ ID NO: 41327 - protein, 117 aa, Artificial Sequence
  Chemically Synthesized
QVQLQESGGGLVQAGGSLRLSCAASGSISGSYTMGWYRQAPGKERELVASIGYGYYLYADSVKGRFTISRDNAKNTVYLQMNSLKPEDTAVYYCAVYDYWDYLHWYWGQGTQVTVSS

SEQ ID NO: 41328 - protein, 118 aa, Artificial Sequence
  Chemically Synthesized
QVQLQESGGGLVQAGGSLRLSCAASGSIFRAEGMGWYRQAPGKERELVAAIGGGTNTYYADSVKGRFTISRDNAKNTVYLQMNSLKPEDTAVYYCAVVYYDTSYLGYWGQGTQVTVSS

SEQ ID NO: 41329 - protein, 118 aa, Artificial Sequence
  Chemically Synthesized
QVQLQESGGGLVQAGGSLRLSCAASGSIFFTVNMGWYRQAPGKEREFVAAISSGATTYYADSVKGRFTISRDNAKNTVYLQMNSLKPEDTAVYYCAVHYPLYTGFYYWGQGTQVTVSS

SEQ ID NO: 41330 - protein, 121 aa, Artificial Sequence
  Chemically Synthesized
QVQLQESGGGLVQAGGSLRLSCAASGNIFWLAGMGWYRQAPGKERELVAGIARGGSTYYADSVKGRFTISRDNAKNTVYLQMNSLKPEDTAVYYCAAIIRYKVDYSYLAYWGQGTQVTVSS

SEQ ID NO: 41331 - protein, 117 aa, Artificial Sequence
  Chemically Synthesized
QVQLQESGGGLVQAGGSLRLSCAASGTIFAYHRMGWYRQAPGKERELVASITRGGSTNYADSVKGRFTISRDNAKNTVYLQMNSLKPEDTAVYYCAAGDFASRLDYWGQGTQVTVSS

SEQ ID NO: 41332 - protein, 118 aa, Artificial Sequence
  Chemically Synthesized
QVQLQESGGGLVQAGGSLRLSCAASGYISSRRGMGWYRQAPGKEREFVASISRGTNTYYADSVKGRFTISRDNAKNTVYLQMNSLKPEDTAVYYCAVYYRFTGWHYYWGQGTQVTVSS

SEQ ID NO: 41333 - protein, 122 aa, Artificial Sequence
  Chemically Synthesized
QVQLQESGGGLVQAGGSLRLSCAASGSISYRPTMGWYRQAPGKEREFVASIARGTTTNYADSVKGRFTISRDNAKNTVYLQMNSLKPEDTAVYYCAAVNRWWTFTYQNHWYWGQGTQVTVSS

SEQ ID NO: 41334 - protein, 115 aa, Artificial Sequence
  Chemically Synthesized
QVQLQESGGGLVQAGGSLRLSCAASGTIFTHPSMGWYRQAPGKEREFVATISWGTNTNYADSVKGRFTISRDNAKNTVYLQMNSLKPEDTAVYYCAAYSTTSLYWGQGTQVTVSS

SEQ ID NO: 41335 - protein, 118 aa, Artificial Sequence
  Chemically Synthesized
QVQLQESGGGLVQAGGSLRLSCAASGYIFGGRWMGWYRQAPGKEREFVAAITRGGTTNYADSVKGRFTISRDNAKNTVYLQMNSLKPEDTAVYYCAAQLYRRRQYYYWGQGTQVTVSS

SEQ ID NO: 41336 - protein, 121 aa, Artificial Sequence
  Chemically Synthesized
QVQLQESGGGLVQAGGSLRLSCAASGSISSTDRMGWYRQAPGKEREFVASINTVVLPYADSVKGRFTISRDNAKNTVYLQMNSLKPEDTAVYYCAVYQDAYWALYAQHWYWGQGTQVTVSS

SEQ ID NO: 41337 - protein, 118 aa, Artificial Sequence
  Chemically Synthesized
QVQLQESGGGLVQAGGSLRLSCAASGSISGQGYMGWYRQAPGKEREFVAGIDYGSITYYADSVKGRFTISRDNAKNTVYLQMNSLKPEDTAVYYCAVYYDRGYVFLYWGQGTQVTVSS

SEQ ID NO: 41338 - protein, 121 aa, Artificial Sequence
  Chemically Synthesized
QVQLQESGGGLVQAGGSLRLSCAASGYISLVNSMGWYRQAPGKEREFVASISTGSSTNYADSVKGRFTISRDNAKNTVYLQMNSLKPEDTAVYYCAAYIDPGGRRSTLIYWGQGTQVTVSS

SEQ ID NO: 41339 - protein, 126 aa, Artificial Sequence
  Chemically Synthesized
QVQLQESGGGLVQAGGSLRLSCAASGNIFPYTAMGWYRQAPGKERELVASIADGTSTYYADSVKGRFTISRDNAKNTVYLQMNSLKPEDTAVYYCAVDYVGTASRYQGWYPYYNYWGQGTQVTVSS

SEQ ID NO: 41340 - protein, 126 aa, Artificial Sequence
  Chemically Synthesized
QVQLQESGGGLVQAGGSLRLSCAASGNIFYIRTMGWYRQAPGKERELVAAISAGSITYYADSVKGRFTISRDNAKNTVYLQMNSLKPEDTAVYYCAAIYDYLTLHVSGFVLDYKYWGQGTQVTVSS

SEQ ID NO: 41341 - protein, 126 aa, Artificial Sequence
  Chemically Synthesized
QVQLQESGGGLVQAGGSLRLSCAASGNISYRGAMGWYRQAPGKEREFVAAITFGATTYYADSVKGRFTISRDNAKNTVYLQMNSLKPEDTAVYYCAAYKRRRLYYVAVAARHLYYWGQGTQVTVSS

SEQ ID NO: 41342 - protein, 115 aa, Artificial Sequence
  Chemically Synthesized
QVQLQESGGGLVQAGGSLRLSCAASGYISRAYRMGWYRQAPGKEREFVASINAGTTTNYADSVKGRFTISRDNAKNTVYLQMNSLKPEDTAVYYCAVRRYWHPYWGQGTQVTVSS

SEQ ID NO: 41343 - protein, 117 aa, Artificial Sequence
  Chemically Synthesized
QVQLQESGGGLVQAGGSLRLSCAASGYIFGSGNMGWYRQAPGKERELVATIDTVLLPYADSVKGRFTISRDNAKNTVYLQMNSLKPEDTAVYYCAALSTNSDDHVYWGQGTQVTVSS

SEQ ID NO: 41344 - protein, 126 aa, Artificial Sequence
  Chemically Synthesized
QVQLQESGGGLVQAGGSLRLSCAASGNISGYYGMGWYRQAPGKERELVATITYGGSTYYADSVKGRFTISRDNAKNTVYLQMNSLKPEDTAVYYCAAVYVRSTGWYRNQFRSHLYWGQGTQVTVSS

SEQ ID NO: 41345 - protein, 115 aa, Artificial Sequence
  Chemically Synthesized
QVQLQESGGGLVQAGGSLRLSCAASGSISDQYDMGWYRQAPGKERELVATIAAGSNTYYADSVKGRFTISRDNAKNTVYLQMNSLKPEDTAVYYCAVGTTHYMYWGQGTQVTVSS

SEQ ID NO: 41346 - protein, 122 aa, Artificial Sequence
  Chemically Synthesized
QVQLQESGGGLVQAGGSLRLSCAASGSIFSYGQMGWYRQAPGKERELVASISLGAITNYADSVKGRFTISRDNAKNTVYLQMNSLKPEDTAVYYCAVKYKRSWYVPRYYPYWGQGTQVTVSS

SEQ ID NO: 41347 - protein, 118 aa, Artificial Sequence
  Chemically Synthesized
QVQLQESGGGLVQAGGSLRLSCAASGYIFSGWYMGWYRQAPGKERELVAAIGYGGSTYYADSVKGRFTISRDNAKNTVYLQMNSLKPEDTAVYYCAAPVRSRASHRYWGQGTQVTVSS

SEQ ID NO: 41348 - protein, 126 aa, Artificial Sequence
  Chemically Synthesized
QVQLQESGGGLVQAGGSLRLSCAASGSIFGVHLMGWYRQAPGKERELVAAITHGGTTYYADSVKGRFTISRDNAKNTVYLQMNSLKPEDTAVYYCAASKLWIRHRGRDPLPDHRYWGQGTQVTVSS

SEQ ID NO: 41349 - protein, 118 aa, Artificial Sequence
  Chemically Synthesized
QVQLQESGGGLVQAGGSLRLSCAASGSIFGGIYMGWYRQAPGKERELVAGIAFGANTYYADSVKGRFTISRDNAKNTVYLQMNSLKPEDTAVYYCAAIDDYDHAHAYWGQGTQVTVSS

SEQ ID NO: 41350 - protein, 122 aa, Artificial Sequence
  Chemically Synthesized
QVQLQESGGGLVQAGGSLRLSCAASGSISYRSRMGWYRQAPGKERELVASISAGTNTYYADSVKGRFTISRDNAKNTVYLQMNSLKPEDTAVYYCAVRTKIVGYGTKGFRYWGQGTQVTVSS

SEQ ID NO: 41351 - protein, 122 aa, Artificial Sequence
  Chemically Synthesized
QVQLQESGGGLVQAGGSLRLSCAASGSISHRQAMGWYRQAPGKERELVAGIARGATTNYADSVKGRFTISRDNAKNTVYLQMNSLKPEDTAVYYCAAIYYVPGSQRLYYGYWGQGTQVTVSS

SEQ ID NO: 41352 - protein, 115 aa, Artificial Sequence
  Chemically Synthesized
QVQLQESGGGLVQAGGSLRLSCAASGNIFAEFSMGWYRQAPGKERELVAAINSGGITYYADSVKGRFTISRDNAKNTVYLQMNSLKPEDTAVYYCAAIYPDYGYWGQGTQVTVSS

SEQ ID NO: 41353 - protein, 122 aa, Artificial Sequence
  Chemically Synthesized
QVQLQESGGGLVQAGGSLRLSCAASGTIFTPRSMGWYRQAPGKERELVATIAYGANTNYADSVKGRFTISRDNAKNTVYLQMNSLKPEDTAVYYCAAWPYARGYYALAYYYWGQGTQVTVSS

SEQ ID NO: 41354 - protein, 125 aa, Artificial Sequence
  Chemically Synthesized
QVQLQESGGGLVQAGGSLRLSCAASGTIFRGLGMGWYRQAPGKEREFVAAISSVVIPYADSVKGRFTISRDNAKNTVYLQMNSLKPEDTAVYYCAASGVYLFTGGRGLPYSFQYWGQGTQVTVSS

SEQ ID NO: 41355 - protein, 118 aa, Artificial Sequence
  Chemically Synthesized
QVQLQESGGGLVQAGGSLRLSCAASGTISPIGAMGWYRQAPGKERELVAGISSGATTYYADSVKGRFTISRDNAKNTVYLQMNSLKPEDTAVYYCAAVTRDARYHGYWGQGTQVTVSS

SEQ ID NO: 41356 - protein, 118 aa, Artificial Sequence
  Chemically Synthesized
QVQLQESGGGLVQAGGSLRLSCAASGSISRYWGMGWYRQAPGKERELVATINYGGSTNYADSVKGRFTISRDNAKNTVYLQMNSLKPEDTAVYYCAAYRSWLLWYRYWGQGTQVTVSS

SEQ ID NO: 41357 - protein, 118 aa, Artificial Sequence
  Chemically Synthesized
QVQLQESGGGLVQAGGSLRLSCAASGYIFQYRFMGWYRQAPGKEREFVAGISDGTNTYYADSVKGRFTISRDNAKNTVYLQMNSLKPEDTAVYYCAAYVTHRRRYVYWGQGTQVTVSS

SEQ ID NO: 41358 - protein, 122 aa, Artificial Sequence
  Chemically Synthesized
QVQLQESGGGLVQAGGSLRLSCAASGSIFVLGAMGWYRQAPGKEREFVAAINRGSNTNYADSVKGRFTISRDNAKNTVYLQMNSLKPEDTAVYYCAAYGYYYYDAVVRHAYWGQGTQVTVSS

SEQ ID NO: 41359 - protein, 122 aa, Artificial Sequence
  Chemically Synthesized
QVQLQESGGGLVQAGGSLRLSCAASGSISYGYYMGWYRQAPGKEREFVASITRGGNTNYADSVKGRFTISRDNAKNTVYLQMNSLKPEDTAVYYCAVKRLALTYRYWYHLYWGQGTQVTVSS

SEQ ID NO: 41360 - protein, 122 aa, Artificial Sequence
  Chemically Synthesized
QVQLQESGGGLVQAGGSLRLSCAASGNISPPDVMGWYRQAPGKEREFVAGISSGATTYYADSVKGRFTISRDNAKNTVYLQMNSLKPEDTAVYYCAAYYADGQTVAGRYNYWGQGTQVTVSS

SEQ ID NO: 41361 - protein, 120 aa, Artificial Sequence
  Chemically Synthesized
QVQLQESGGGLVQAGGSLRLSCAASGTIFTQDTMGWYRQAPGKEREFVAAISYGANTYYADSVKGRFTISRDNAKNTVYLQMNSLKPEDTAVYYCAAVPYRDYHVYFAYWGQGTQVTVSS

SEQ ID NO: 41362 - protein, 118 aa, Artificial Sequence
  Chemically Synthesized
QVQLQESGGGLVQAGGSLRLSCAASGTIFRKRGMGWYRQAPGKEREFVAGIGYGANTYYADSVKGRFTISRDNAKNTVYLQMNSLKPEDTAVYYCAVYSGIRWAHPYWGQGTQVTVSS

SEQ ID NO: 41363 - protein, 118 aa, Artificial Sequence
  Chemically Synthesized
QVQLQESGGGLVQAGGSLRLSCAASGSISYSVGMGWYRQAPGKERELVAAINDGANTYYADSVKGRFTISRDNAKNTVYLQMNSLKPEDTAVYYCAVVYRGERYFGYWGQGTQVTVSS

SEQ ID NO: 41364 - protein, 118 aa, Artificial Sequence
  Chemically Synthesized
QVQLQESGGGLVQAGGSLRLSCAASGYIFANLAMGWYRQAPGKERELVAGIARGGTTYYADSVKGRFTISRDNAKNTVYLQMNSLKPEDTAVYYCAATAYDRNYLFYWGQGTQVTVSS

SEQ ID NO: 41365 - protein, 118 aa, Artificial Sequence
  Chemically Synthesized
QVQLQESGGGLVQAGGSLRLSCAASGNISQRRRMGWYRQAPGKEREFVAAIAYGASTYYADSVKGRFTISRDNAKNTVYLQMNSLKPEDTAVYYCAAKSHYTYRFPYWGQGTQVTVSS

SEQ ID NO: 41366 - protein, 118 aa, Artificial Sequence
  Chemically Synthesized
QVQLQESGGGLVQAGGSLRLSCAASGTIFHRRPMGWYRQAPGKEREFVASIDRGASTNYADSVKGRFTISRDNAKNTVYLQMNSLKPEDTAVYYCAAAVWRIVYHVYWGQGTQVTVSS

SEQ ID NO: 41367 - protein, 125 aa, Artificial Sequence
  Chemically Synthesized
QVQLQESGGGLVQAGGSLRLSCAASGTISGDDGMGWYRQAPGKERELVATITVVVIPYADSVKGRFTISRDNAKNTVYLQMNSLKPEDTAVYYCAANRGEPQYWISDRPRYLVYWGQGTQVTVSS

SEQ ID NO: 41368 - protein, 117 aa, Artificial Sequence
  Chemically Synthesized
QVQLQESGGGLVQAGGSLRLSCAASGTISYDTVMGWYRQAPGKEREFVAAIGFGSTTNYADSVKGRFTISRDNAKNTVYLQMNSLKPEDTAVYYCAAYVGTYPSHYWGQGTQVTVSS

SEQ ID NO: 41369 - protein, 122 aa, Artificial Sequence
  Chemically Synthesized
QVQLQESGGGLVQAGGSLRLSCAASGYISRTRYMGWYRQAPGKERELVAAIDAGSSTYYADSVKGRFTISRDNAKNTVYLQMNSLKPEDTAVYYCAVVLRSYGYRTIVHYYWGQGTQVTVSS

SEQ ID NO: 41370 - protein, 126 aa, Artificial Sequence
  Chemically Synthesized
QVQLQESGGGLVQAGGSLRLSCAASGNISGPSVMGWYRQAPGKERELVASIAYGSNTYYADSVKGRFTISRDNAKNTVYLQMNSLKPEDTAVYYCAAVVFGGISPLGVVVQPHGYWGQGTQVTVSS

SEQ ID NO: 41371 - protein, 118 aa, Artificial Sequence
  Chemically Synthesized
QVQLQESGGGLVQAGGSLRLSCAASGTISGRITMGWYRQAPGKEREFVAGIATGSTTNYADSVKGRFTISRDNAKNTVYLQMNSLKPEDTAVYYCAAVVKGYTTHGYWGQGTQVTVSS

SEQ ID NO: 41372 - protein, 122 aa, Artificial Sequence
  Chemically Synthesized
QVQLQESGGGLVQAGGSLRLSCAASGSIFRRTYMGWYRQAPGKERELVAAIGHGGNTYYADSVKGRFTISRDNAKNTVYLQMNSLKPEDTAVYYCAASDTYNLADRALHLYWGQGTQVTVSS

SEQ ID NO: 41373 - protein, 118 aa, Artificial Sequence
  Chemically Synthesized
QVQLQESGGGLVQAGGSLRLSCAASGSIFRYGGMGWYRQAPGKERELVAGISQGSITYYADSVKGRFTISRDNAKNTVYLQMNSLKPEDTAVYYCAVVTRSIPPFGYWGQGTQVTVSS

SEQ ID NO: 41374 - protein, 118 aa, Artificial Sequence
  Chemically Synthesized
QVQLQESGGGLVQAGGSLRLSCAASGTIFRYFRMGWYRQAPGKERELVATIGWGSNTNYADSVKGRFTISRDNAKNTVYLQMNSLKPEDTAVYYCAVRYRVRDRHSYWGQGTQVTVSS

SEQ ID NO: 41375 - protein, 118 aa, Artificial Sequence
  Chemically Synthesized
QVQLQESGGGLVQAGGSLRLSCAASGYISNIGAMGWYRQAPGKEREFVAAIGGGGTTNYADSVKGRFTISRDNAKNTVYLQMNSLKPEDTAVYYCAAVTSDRYYHGYWGQGTQVTVSS

SEQ ID NO: 41376 - protein, 118 aa, Artificial Sequence
  Chemically Synthesized
QVQLQESGGGLVQAGGSLRLSCAASGTISTYRYMGWYRQAPGKEREFVATINRGTTTYYADSVKGRFTISRDNAKNTVYLQMNSLKPEDTAVYYCAANPWWLYYHPYWGQGTQVTVSS

SEQ ID NO: 41377 - protein, 118 aa, Artificial Sequence
  Chemically Synthesized
QVQLQESGGGLVQAGGSLRLSCAASGYIFLRAIMGWYRQAPGKEREFVAGITHGGNTNYADSVKGRFTISRDNAKNTVYLQMNSLKPEDTAVYYCAVANYGQDRFFYWGQGTQVTVSS

SEQ ID NO: 41378 - protein, 117 aa, Artificial Sequence
  Chemically Synthesized
QVQLQESGGGLVQAGGSLRLSCAASGNIFPPSGMGWYRQAPGKEREFVASIAYGGTTYYADSVKGRFTISRDNAKNTVYLQMNSLKPEDTAVYYCAFTTSLTRSYYWGQGTQVTVSS

SEQ ID NO: 41379 - protein, 125 aa, Artificial Sequence
  Chemically Synthesized
QVQLQESGGGLVQAGGSLRLSCAASGSISKPVDMGWYRQAPGKEREFVAGITDGSTTNYADSVKGRFTISRDNAKNTVYLQMNSLKPEDTAVYYCAAGYGPRRYHVGKSYGHAYWGQGTQVTVSS

SEQ ID NO: 41380 - protein, 122 aa, Artificial Sequence
  Chemically Synthesized
QVQLQESGGGLVQAGGSLRLSCAASGNIFSSWPMGWYRQAPGKERELVAGIAPGASTYYADSVKGRFTISRDNAKNTVYLQMNSLKPEDTAVYYCAALFLTRTRDSYGHRYWGQGTQVTVSS

SEQ ID NO: 41381 - protein, 118 aa, Artificial Sequence
  Chemically Synthesized
QVQLQESGGGLVQAGGSLRLSCAASGTIFTQDSMGWYRQAPGKEREFVAAITPGSSTYYADSVKGRFTISRDNAKNTVYLQMNSLKPEDTAVYYCAVYRISDALFYYWGQGTQVTVSS

SEQ ID NO: 41382 - protein, 118 aa, Artificial Sequence
  Chemically Synthesized
QVQLQESGGGLVQAGGSLRLSCAASGTIFRRDDMGWYRQAPGKEREFVAGINYGGSTNYADSVKGRFTISRDNAKNTVYLQMNSLKPEDTAVYYCAAQRNAVYYLLYWGQGTQVTVSS

SEQ ID NO: 41383 - protein, 117 aa, Artificial Sequence
  Chemically Synthesized
QVQLQESGGGLVQAGGSLRLSCAASGTISYITLMGWYRQAPGKEREFVATIAVGTNTYYADSVKGRFTISRDNAKNTVYLQMNSLKPEDTAVYYCAAVTQSSGYYYWGQGTQVTVSS

SEQ ID NO: 41384 - protein, 122 aa, Artificial Sequence
  Chemically Synthesized
QVQLQESGGGLVQAGGSLRLSCAASGNIFYPYLMGWYRQAPGKERELVASITWGGSTYYADSVKGRFTISRDNAKNTVYLQMNSLKPEDTAVYYCAALYIQGTDVLEIYTYWGQGTQVTVSS

SEQ ID NO: 41385 - protein, 121 aa, Artificial Sequence
  Chemically Synthesized
QVQLQESGGGLVQAGGSLRLSCAASGSISTTGHMGWYRQAPGKERELVATINGGTTYYADSVKGRFTISRDNAKNTVYLQMNSLKPEDTAVYYCAVTAYDHHIRHQKHYYWGQGTQVTVSS

SEQ ID NO: 41386 - protein, 118 aa, Artificial Sequence
  Chemically Synthesized
QVQLQESGGGLVQAGGSLRLSCAASGNISRGHYMGWYRQAPGKEREFVATIAYGTSTNYADSVKGRFTISRDNAKNTVYLQMNSLKPEDTAVYYCAVDSYSDQSLDYWGQGTQVTVSS

SEQ ID NO: 41387 - protein, 118 aa, Artificial Sequence
  Chemically Synthesized
QVQLQESGGGLVQAGGSLRLSCAASGTISDRYWMGWYRQAPGKEREFVAAISPGGSTYYADSVKGRFTISRDNAKNTVYLQMNSLKPEDTAVYYCAVPGYYSNYHAYWGQGTQVTVSS

SEQ ID NO: 41388 - protein, 121 aa, Artificial Sequence
  Chemically Synthesized
QVQLQESGGGLVQAGGSLRLSCAASGNISEKRMGWYRQAPGKERELVASIDSGTSTNYADSVKGRFTISRDNAKNTVYLQMNSLKPEDTAVYYCAAVELRDYTDNDYHAYWGQGTQVTVSS

SEQ ID NO: 41389 - protein, 122 aa, Artificial Sequence
  Chemically Synthesized
QVQLQESGGGLVQAGGSLRLSCAASGYISHGAYMGWYRQAPGKERELVAAITRGANTYYADSVKGRFTISRDNAKNTVYLQMNSLKPEDTAVYYCAVIRPVRDVNRLRHWYWGQGTQVTVSS

SEQ ID NO: 41390 - protein, 121 aa, Artificial Sequence
  Chemically Synthesized
QVQLQESGGGLVQAGGSLRLSCAASGYIFDYDIMGWYRQAPGKERELVASIGTGGTTYYADSVKGRFTISRDNAKNTVYLQMNSLKPEDTAVYYCAVAIRVNGYHGFHVYWGQGTQVTVSS

SEQ ID NO: 41391 - protein, 118 aa, Artificial Sequence
  Chemically Synthesized
QVQLQESGGGLVQAGGSLRLSCAASGSISPRTIMGWYRQAPGKERELVAGIAGGGNTYYADSVKGRFTISRDNAKNTVYLQMNSLKPEDTAVYYCAAAYYGGKWLAYWGQGTQVTVSS

SEQ ID NO: 41392 - protein, 122 aa, Artificial Sequence
  Chemically Synthesized
QVQLQESGGGLVQAGGSLRLSCAASGTIFSYVVMGWYRQAPGKEREFVAAIGYGGTTNYADSVKGRFTISRDNAKNTVYLQMNSLKPEDTAVYYCAVAGYVAYGRQPTHLYWGQGTQVTVSS

SEQ ID NO: 41393 - protein, 118 aa, Artificial Sequence
  Chemically Synthesized
QVQLQESGGGLVQAGGSLRLSCAASGTIFTGAYMGWYRQAPGKERELVASITGGCYYQYADSVKGRFTISRDNAKNTVYLQMNSLKPEDTAVYYCAAGAYGVDSFGYWGQGTQVTVSS

SEQ ID NO: 41394 - protein, 122 aa, Artificial Sequence
  Chemically Synthesized
QVQLQESGGGLVQAGGSLRLSCAASGYIFGHRRMGWYRQAPGKERELVASITPGSTTNYADSVKGRFTISRDNAKNTVYLQMNSLKPEDTAVYYCAAITYWTAYYKRRHYYWGQGTQVTVSS

SEQ ID NO: 41395 - protein, 118 aa, Artificial Sequence
  Chemically Synthesized
QVQLQESGGGLVQAGGSLRLSCAASGNISLVYLMGWYRQAPGKERELVAAITLGAITNYADSVKGRFTISRDNAKNTVYLQMNSLKPEDTAVYYCAVAYFHDVLHYYWGQGTQVTVSS

SEQ ID NO: 41396 - protein, 122 aa, Artificial Sequence
  Chemically Synthesized
QVQLQESGGGLVQAGGSLRLSCAASGNISSPYRMGWYRQAPGKERELVASIDWGSSTNYADSVKGRFTISRDNAKNTVYLQMNSLKPEDTAVYYCAVPNDYVDSYDQYYEYWGQGTQVTVSS

SEQ ID NO: 41397 - protein, 118 aa, Artificial Sequence
  Chemically Synthesized
QVQLQESGGGLVQAGGSLRLSCAASGSIFFLPTMGWYRQAPGKEREFVATISSGGNTYYADSVKGRFTISRDNAKNTVYLQMNSLKPEDTAVYYCAADWRSTLTLGYWGQGTQVTVSS

SEQ ID NO: 41398 - protein, 118 aa, Artificial Sequence
  Chemically Synthesized
QVQLQESGGGLVQAGGSLRLSCAASGNISSFRTMGWYRQAPGKEREFVASINRGGSTNYADSVKGRFTISRDNAKNTVYLQMNSLKPEDTAVYYCAVQTRLARWHPYWGQGTQVTVSS

SEQ ID NO: 41399 - protein, 114 aa, Artificial Sequence
  Chemically Synthesized
QVQLQESGGGLVQAGGSLRLSCAASGRMGWYRQAPGKERELVASINGGSTYADSVKGRFTISRDNAKNTVYLQMNSLKPEDTAVYYCAAEYYDVYLYIVDHSYWGQGTQVTVSS

SEQ ID NO: 41400 - protein, 118 aa, Artificial Sequence
  Chemically Synthesized
QVQLQESGGGLVQAGGSLRLSCAASGTISPRYTMGWYRQAPGKERELVASITGGWYYQYADSVKGRFTISRDNAKNTVYLQMNSLKPEDTAVYYCAVEADTENSFQYWGQGTQVTVSS

SEQ ID NO: 41401 - protein, 122 aa, Artificial Sequence
  Chemically Synthesized
QVQLQESGGGLVQAGGSLRLSCAASGSISSKRFMGWYRQAPGKERELVAGIDYGANTNYADSVKGRFTISRDNAKNTVYLQMNSLKPEDTAVYYCAAGLITVQYEAYQLYYWGQGTQVTVSS

SEQ ID NO: 41402 - protein, 119 aa, Artificial Sequence
  Chemically Synthesized
QVQLQESGGGLVQAGGSLRLSCAASGSISSRFIMGWYRQAPGKEREFVAAIGTGSNTNYADSVKGRFTISRDNAKNTVYLQMNSLKPEDTAVYYCAALYRTAVGWLAYWGQGTQVTVSS

SEQ ID NO: 41403 - protein, 117 aa, Artificial Sequence
  Chemically Synthesized
QVQLQESGGGLVQAGGSLRLSCAASGNISDGDTMGWYRQAPGKEREFVATIGLGGNTYYADSVKGRFTISRDNAKNTVYLQMNSLKPEDTAVYYCAVTYKQTSGMYWGQGTQVTVSS

SEQ ID NO: 41404 - protein, 122 aa, Artificial Sequence
  Chemically Synthesized
QVQLQESGGGLVQAGGSLRLSCAASGNISSPTYMGWYRQAPGKEREFVAAITTGANTNYADSVKGRFTISRDNAKNTVYLQMNSLKPEDTAVYYCAVNFWDAYYASCTNIYWGQGTQVTVSS

SEQ ID NO: 41405 - protein, 118 aa, Artificial Sequence
  Chemically Synthesized
QVQLQESGGGLVQAGGSLRLSCAASGSIFPDKYMGWYRQAPGKERELVAAIGQGGITNYADSVKGRFTISRDNAKNTVYLQMNSLKPEDTAVYYCAVYRVGTNYFLYWGQGTQVTVSS

SEQ ID NO: 41406 - protein, 118 aa, Artificial Sequence
  Chemically Synthesized
QVQLQESGGGLVQAGGSLRLSCAASGYIFGSYSMGWYRQAPGKEREFVAAIAPGGITNYADSVKGRFTISRDNAKNTVYLQMNSLKPEDTAVYYCAVLIAYSDWHVYWGQGTQVTVSS

SEQ ID NO: 41407 - protein, 118 aa, Artificial Sequence
  Chemically Synthesized
QVQLQESGGGLVQAGGSLRLSCAASGSISGRYSMGWYRQAPGKEREFVASIAYGTSTNYADSVKGRFTISRDNAKNTVYLQMNSLKPEDTAVYYCAATDPDVVLYPYWGQGTQVTVSS

SEQ ID NO: 41408 - protein, 122 aa, Artificial Sequence
  Chemically Synthesized
QVQLQESGGGLVQAGGSLRLSCAASGTIFTRVYMGWYRQAPGKEREFVASIGYGAITNYADSVKGRFTISRDNAKNTVYLQMNSLKPEDTAVYYCAAGQIGLRSSNDSHGYWGQGTQVTVSS

SEQ ID NO: 41409 - protein, 118 aa, Artificial Sequence
  Chemically Synthesized
QVQLQESGGGLVQAGGSLRLSCAASGYISAPHVMGWYRQAPGKEREFVAAIGYGSNTYYADSVKGRFTISRDNAKNTVYLQMNSLKPEDTAVYYCAVRWGKVAEYEYWGQGTQVTVSS

SEQ ID NO: 41410 - protein, 121 aa, Artificial Sequence
  Chemically Synthesized
QVQLQESGGGLVQAGGSLRLSCAASGYISRGGKMGWYRQAPGKEREFVAGITYGSNTNYADSVKGRFTISRDNAKNTVYLQMNSLKPEDTAVYYCAVRLFHGLYSCPVLYWGQGTQVTVSS

SEQ ID NO: 41411 - protein, 118 aa, Artificial Sequence
  Chemically Synthesized
QVQLQESGGGLVQAGGSLRLSCAASGNISQTTYMGWYRQAPGKERELVATIANGTNTNYADSVKGRFTISRDNAKNTVYLQMNSLKPEDTAVYYCAAGFQYKYPLHYWGQGTQVTVSS

SEQ ID NO: 41412 - protein, 118 aa, Artificial Sequence
  Chemically Synthesized
QVQLQESGGGLVQAGGSLRLSCAASGNLVTCMGWYRQAPGKEREFVAGIGVGSSTNYADSVKGRFTISRDNAKNTVYLQMNSLKPEDTAVYYCAVEDWTDRTGTFIYWGQGTQVTVSS

SEQ ID NO: 41413 - protein, 122 aa, Artificial Sequence
  Chemically Synthesized
QVQLQESGGGLVQAGGSLRLSCAASGTISPSGIMGWYRQAPGKEREFVAGIAGGGNTNYADSVKGRFTISRDNAKNTVYLQMNSLKPEDTAVYYCAVLSEGPAGPRYRHVYWGQGTQVTVSS

SEQ ID NO: 41414 - protein, 123 aa, Artificial Sequence
  Chemically Synthesized
QVQLQESGGGLVQAGGSLRLSCAASGTIFAGRDMGWYRQAPGKERELVAGIDNGASTNYADSVKGRFTISRDNAKNTVYLQMNSLKPEDTAVYYCAAGTVLTVLTFVVTFIYWGQGTQVTVSS

SEQ ID NO: 41415 - protein, 121 aa, Artificial Sequence
  Chemically Synthesized
QVQLQESGGGLVQAGGSLRLSCAASGTISYSDYMGWYRQAPGKERELVAAITPGGNTNYADSVKGRFTISRDNAKNTVYLQMNSLKPEDTAVYYCAAYNELRESYFESIYWGQGTQVTVSS

SEQ ID NO: 41416 - protein, 118 aa, Artificial Sequence
  Chemically Synthesized
QVQLQESGGGLVQAGGSLRLSCAASGSISSQYAMGWYRQAPGKEREFVATIATGASTNYADSVKGRFTISRDNAKNTVYLQMNSLKPEDTAVYYCAALYINDGPHLYWGQGTQVTVSS

SEQ ID NO: 41417 - protein, 122 aa, Artificial Sequence
  Chemically Synthesized
QVQLQESGGGLVQAGGSLRLSCAASGTISKVRVMGWYRQAPGKERELVAGIGHGSITYYADSVKGRFTISRDNAKNTVYLQMNSLKPEDTAVYYCAALSFAHPRPSQYHGYWGQGTQVTVSS

SEQ ID NO: 41418 - protein, 118 aa, Artificial Sequence
  Chemically Synthesized
QVQLQESGGGLVQAGGSLRLSCAASGNISYRRFMGWYRQAPGKERELVAGIGSGSNTYYADSVKGRFTISRDNAKNTVYLQMNSLKPEDTAVYYCAVYVYRVYTHHYWGQGTQVTVSS

SEQ ID NO: 41419 - protein, 117 aa, Artificial Sequence
  Chemically Synthesized
QVQLQESGGGLVQAGGSLRLSCAASGTIFWRNRMGWYRQAPGKEREFVAAIAGGGNTYYADSVKGRFTISRDNAKNTVYLQMNSLKPEDTAVYYCARGPHSLEHSYWGQGTQVTVSS

SEQ ID NO: 41420 - protein, 122 aa, Artificial Sequence
  Chemically Synthesized
QVQLQESGGGLVQAGGSLRLSCAASGTISPAVYMGWYRQAPGKEREFVAAIADGGNTYYADSVKGRFTISRDNAKNTVYLQMNSLKPEDTAVYYCAAIQGRSQRGYGWHNYWGQGTQVTVSS

SEQ ID NO: 41421 - protein, 124 aa, Artificial Sequence
  Chemically Synthesized
QVQLQESGGGLVQAGGSLRLSCAASGTIFPLFYMGWYRQAPGKERELVAGITTGGSTYADSVKGRFTISRDNAKNTVYLQMNSLKPEDTAVYYCAVDPHTYVVISGRGGVHGYWGQGTQVTVSS

SEQ ID NO: 41422 - protein, 122 aa, Artificial Sequence
  Chemically Synthesized
QVQLQESGGGLVQAGGSLRLSCAASGYISQRYYMGWYRQAPGKERELVAAIAYGASTYYADSVKGRFTISRDNAKNTVYLQMNSLKPEDTAVYYCAAIYGYDYTNDVYLEYWGQGTQVTVSS

SEQ ID NO: 41423 - protein, 118 aa, Artificial Sequence
  Chemically Synthesized
QVQLQESGGGLVQAGGSLRLSCAASGTISPWSPMGWYRQAPGKERELVAAIAFGAITYYADSVKGRFTISRDNAKNTVYLQMNSLKPEDTAVYYCAVFPYGTPEFPYWGQGTQVTVSS

SEQ ID NO: 41424 - protein, 117 aa, Artificial Sequence
  Chemically Synthesized
QVQLQESGGGLVQAGGSLRLSCAASGTIFFPIMGWYRQAPGKEREFVAAINVGTITNYADSVKGRFTISRDNAKNTVYLQMNSLKPEDTAVYYCAAVKTNHYYHIYWGQGTQVTVSS

SEQ ID NO: 41425 - protein, 126 aa, Artificial Sequence
  Chemically Synthesized
QVQLQESGGGLVQAGGSLRLSCAASGSIFLSGVMGWYRQAPGKEREFVAGINYGSTTNYADSVKGRFTISRDNAKNTVYLQMNSLKPEDTAVYYCAAVVRHRSGYQDDKDKQHVYWGQGTQVTVSS

SEQ ID NO: 41426 - protein, 117 aa, Artificial Sequence
  Chemically Synthesized
QVQLQESGGGLVQAGGSLRLSCAASGYISETGVMGWYRQAPGKEREFVATIDLGTITNYADSVKGRFTISRDNAKNTVYLQMNSLKPEDTAVYYCAVTLSTTTVMYWGQGTQVTVSS

SEQ ID NO: 41427 - protein, 122 aa, Artificial Sequence
  Chemically Synthesized
QVQLQESGGGLVQAGGSLRLSCAASGTIFPYYEMGWYRQAPGKEREFVASITTGSITNYADSVKGRFTISRDNAKNTVYLQMNSLKPEDTAVYYCAAVDDGSSAIRDDLDYWGQGTQVTVSS

SEQ ID NO: 41428 - protein, 118 aa, Artificial Sequence
  Chemically Synthesized
QVQLQESGGGLVQAGGSLRLSCAASGNIFARYNMGWYRQAPGKERELVASIDSGGNTNYADSVKGRFTISRDNAKNTVYLQMNSLKPEDTAVYYCAARSDADPIFYYWGQGTQVTVSS

SEQ ID NO: 41429 - protein, 118 aa, Artificial Sequence
  Chemically Synthesized
QVQLQESGGGLVQAGGSLRLSCAASGYIFFVYKMGWYRQAPGKERELVASIANGGITYYADSVKGRFTISRDNAKNTVYLQMNSLKPEDTAVYYCAAWFRLDIPLRYWGQGTQVTVSS

SEQ ID NO: 41430 - protein, 118 aa, Artificial Sequence
  Chemically Synthesized
QVQLQESGGGLVQAGGSLRLSCAASGYISGDGIMGWYRQAPGKEREFVAAIDTGSITYYADSVKGRFTISRDNAKNTVYLQMNSLKPEDTAVYYCAAFYQRYDTHGYWGQGTQVTVSS

SEQ ID NO: 41431 - protein, 118 aa, Artificial Sequence
  Chemically Synthesized
QVQLQESGGGLVQAGGSLRLSCAASGSISRQTYMGWYRQAPGKERELVASISRGSITNYADSVKGRFTISRDNAKNTVYLQMNSLKPEDTAVYYCAATVWFLRYLKYWGQGTQVTVSS

SEQ ID NO: 41432 - protein, 118 aa, Artificial Sequence
  Chemically Synthesized
QVQLQESGGGLVQAGGSLRLSCAASGNIFYKAIMGWYRQAPGKERELVAAIAVGANTNYADSVKGRFTISRDNAKNTVYLQMNSLKPEDTAVYYCAVWDAGTYDYWYWGQGTQVTVSS

SEQ ID NO: 41433 - protein, 118 aa, Artificial Sequence
  Chemically Synthesized
QVQLQESGGGLVQAGGSLRLSCAASGTIFSAKPMGWYRQAPGKEREFVATINHGGSTYYADSVKGRFTISRDNAKNTVYLQMNSLKPEDTAVYYCAVADRYYRIYGYWGQGTQVTVSS

SEQ ID NO: 41434 - protein, 122 aa, Artificial Sequence
  Chemically Synthesized
QVQLQESGGGLVQAGGSLRLSCAASGSISRTYYMGWYRQAPGKERELVAGITYGSTTNYADSVKGRFTISRDNAKNTVYLQMNSLKPEDTAVYYCAVPPVRYWSYPRRYYYWGQGTQVTVSS

SEQ ID NO: 41435 - protein, 122 aa, Artificial Sequence
  Chemically Synthesized
QVQLQESGGGLVQAGGSLRLSCAASGTISDPYYMGWYRQAPGKERELVAGIGTGANTNYADSVKGRFTISRDNAKNTVYLQMNSLKPEDTAVYYCAVGETPGSSYGSPHVYWGQGTQVTVSS

SEQ ID NO: 41436 - protein, 122 aa, Artificial Sequence
  Chemically Synthesized
QVQLQESGGGLVQAGGSLRLSCAASGTISYLSPMGWYRQAPGKEREFVATISTGGITYYADSVKGRFTISRDNAKNTVYLQMNSLKPEDTAVYYCAAYSYTYDQYGIYYRYWGQGTQVTVSS

SEQ ID NO: 41437 - protein, 122 aa, Artificial Sequence
  Chemically Synthesized
QVQLQESGGGLVQAGGSLRLSCAASGTIFVYSNMGWYRQAPGKEREFVAAIGTGTSTYYADSVKGRFTISRDNAKNTVYLQMNSLKPEDTAVYYCAALHTARDGSARYHTYWGQGTQVTVSS

SEQ ID NO: 41438 - protein, 117 aa, Artificial Sequence
  Chemically Synthesized
QVQLQESGGGLVQAGGSLRLSCAASGNIFTDDKMGWYRQAPGKERELVAGIDVVLPYADSVKGRFTISRDNAKNTVYLQMNSLKPEDTAVYYCAAGRYYLLAVHAYWGQGTQVTVSS

SEQ ID NO: 41439 - protein, 118 aa, Artificial Sequence
  Chemically Synthesized
QVQLQESGGGLVQAGGSLRLSCAASGYISRILSMGWYRQAPGKEREFVAAISWGSTTYYADSVKGRFTISRDNAKNTVYLQMNSLKPEDTAVYYCAVHRGYVRAFRYWGQGTQVTVSS

SEQ ID NO: 41440 - protein, 117 aa, Artificial Sequence
  Chemically Synthesized
QVQLQESGGGLVQAGGSLRLSCAASGNIFIHVSMGWYRQAPGKERELVATIADGGSTYYADSVKGRFTISRDNAKNTVYLQMNSLKPEDTAVYYCAAYFYYPGHYYWGQGTQVTVSS

SEQ ID NO: 41441 - protein, 122 aa, Artificial Sequence
  Chemically Synthesized
QVQLQESGGGLVQAGGSLRLSCAASGSISKQSAMGWYRQAPGKEREFVAGINYGANTNYADSVKGRFTISRDNAKNTVYLQMNSLKPEDTAVYYCAAVFYIQYQGGYDLDYWGQGTQVTVSS

SEQ ID NO: 41442 - protein, 119 aa, Artificial Sequence
  Chemically Synthesized
QVQLQESGGGLVQAGGSLRLSCAASGNIFRHLTVMGWYRQAPGKEREFVAGIAPGASTNYADSVKGRFTISRDNAKNTVYLQMNSLKPEDTAVYYCAALWQRDQTHVYWGQGTQVTVSS

SEQ ID NO: 41443 - protein, 126 aa, Artificial Sequence
  Chemically Synthesized
QVQLQESGGGLVQAGGSLRLSCAASGNIFGRVRMGWYRQAPGKEREFVAGIGYGSTTNYADSVKGRFTISRDNAKNTVYLQMNSLKPEDTAVYYCAARTRAESAAVAIARGWHGYWGQGTQVTVSS

SEQ ID NO: 41444 - protein, 119 aa, Artificial Sequence
  Chemically Synthesized
QVQLQESGGGLVQAGGSLRLSCAASGTIFRVAIMGWYRQAPGKEREFVAAINRGGSNTYYADSVKGRFTISRDNAKNTVYLQMNSLKPEDTAVYYCAVYKLYTGNFGYWGQGTQVTVSS

SEQ ID NO: 41445 - protein, 126 aa, Artificial Sequence
  Chemically Synthesized
QVQLQESGGGLVQAGGSLRLSCAASGSIFLKATMGWYRQAPGKERELVAAITRGGITYYADSVKGRFTISRDNAKNTVYLQMNSLKPEDTAVYYCAAYRYYWAGTANDYRRRYSYWGQGTQVTVSS

SEQ ID NO: 41446 - protein, 122 aa, Artificial Sequence
  Chemically Synthesized
QVQLQESGGGLVQAGGSLRLSCAASGTIFEGLYMGWYRQAPGKERELVASIATGASTNYADSVKGRFTISRDNAKNTVYLQMNSLKPEDTAVYYCAAGATYDSTAGTDHPYWGQGTQVTVSS

SEQ ID NO: 41447 - protein, 117 aa, Artificial Sequence
  Chemically Synthesized
QVQLQESGGGLVQAGGSLRLSCAASGNISRPRRMGWYRQAPGKEREFVAAISRGTNTYYADSVKGRFTISRDNAKNTVYLQMNSLKPEDTAVYYCAVWRTYSWYDYWGQGTQVTVSS

SEQ ID NO: 41448 - protein, 118 aa, Artificial Sequence
  Chemically Synthesized
QVQLQESGGGLVQAGGSLRLSCAASGTIFRDTTMGWYRQAPGKEREFVASIGIGGNTNYADSVKGRFTISRDNAKNTVYLQMNSLKPEDTAVYYCAVVEARYRQHIYWGQGTQVTVSS

SEQ ID NO: 41449 - protein, 118 aa, Artificial Sequence
  Chemically Synthesized
QVQLQESGGGLVQAGGSLRLSCAASGSISVAEYMGWYRQAPGKEREFVATINSGSTTNYADSVKGRFTISRDNAKNTVYLQMNSLKPEDTAVYYCAATYSLLPSHAYWGQGTQVTVSS

SEQ ID NO: 41450 - protein, 122 aa, Artificial Sequence
  Chemically Synthesized
QVQLQESGGGLVQAGGSLRLSCAASGTIFGPTDMGWYRQAPGKERELVASIGYGTITYYADSVKGRFTISRDNAKNTVYLQMNSLKPEDTAVYYCAAGNSTTDQRFYVLPYWGQGTQVTVSS

SEQ ID NO: 41451 - protein, 123 aa, Artificial Sequence
  Chemically Synthesized
QVQLQESGGGLVQAGGSLRLSCAASGSISLSPRMGWYRQAPGKERELVATIGRGGSTYYADSVKGRFTISRDNAKNTVYLQMNSLKPEDTAVYYCAVTVGLYYSYLYRSHYYWGQGTQVTVSS

SEQ ID NO: 41452 - protein, 122 aa, Artificial Sequence
  Chemically Synthesized
QVQLQESGGGLVQAGGSLRLSCAASGTISADSIMGWYRQAPGKEREFVASIDAGGTTNYADSVKGRFTISRDNAKNTVYLQMNSLKPEDTAVYYCAVSYLYDEYIGWRYNYWGQGTQVTVSS

SEQ ID NO: 41453 - protein, 122 aa, Artificial Sequence
  Chemically Synthesized
QVQLQESGGGLVQAGGSLRLSCAASGTIFYDVTMGWYRQAPGKERELVATITAGGSTYYADSVKGRFTISRDNAKNTVYLQMNSLKPEDTAVYYCAAWYTVDYDPNFAHNYWGQGTQVTVSS

SEQ ID NO: 41454 - protein, 118 aa, Artificial Sequence
  Chemically Synthesized
QVQLQESGGGLVQAGGSLRLSCAASGNISPTWTMGWYRQAPGKERELVAAIDPGGSTYYADSVKGRFTISRDNAKNTVYLQMNSLKPEDTAVYYCAAYYSVAGDLEYWGQGTQVTVSS

SEQ ID NO: 41455 - protein, 122 aa, Artificial Sequence
  Chemically Synthesized
QVQLQESGGGLVQAGGSLRLSCAASGSISWQQYMGWYRQAPGKERELVATIDYGGTTNYADSVKGRFTISRDNAKNTVYLQMNSLKPEDTAVYYCAVQRYRYPWRRWVYAYWGQGTQVTVSS

SEQ ID NO: 41456 - protein, 126 aa, Artificial Sequence
  Chemically Synthesized
QVQLQESGGGLVQAGGSLRLSCAASGTIFPGYYMGWYRQAPGKERELVAGISYGGSTYYADSVKGRFTISRDNAKNTVYLQMNSLKPEDTAVYYCAVWRSDGDLARGPGYDPLVYWGQGTQVTVSS

SEQ ID NO: 41457 - protein, 118 aa, Artificial Sequence
  Chemically Synthesized
QVQLQESGGGLVQAGGSLRLSCAASGNIFLTRYMGWYRQAPGKEREFVATITRGGTTYYADSVKGRFTISRDNAKNTVYLQMNSLKPEDTAVYYCAVYRKYSTDFRYWGQGTQVTVSS

SEQ ID NO: 41458 - protein, 121 aa, Artificial Sequence
  Chemically Synthesized
QVQLQESGGGLVQAGGSLRLSCAASGTIFYALRMGWYRQAPGKERELVAGISTGSNTNYADSVKGRFTISRDNAKNTVYLQMNSLKPEDTAVYYCAAWPFLLTALDTHGYWGQGTQVTVSS

SEQ ID NO: 41459 - protein, 118 aa, Artificial Sequence
  Chemically Synthesized
QVQLQESGGGLVQAGGSLRLSCAASGNISPATVMGWYRQAPGKEREFVAAITGGTSTYYADSVKGRFTISRDNAKNTVYLQMNSLKPEDTAVYYCAVVGTGRKDYAYWGQGTQVTVSS

SEQ ID NO: 41460 - protein, 112 aa, Artificial Sequence
  Chemically Synthesized
QVQLQESGGGLVQAGGSLRLSCAASGYISDFYNMGWYRQAPGKERELVAGIAYADSVKGRFTISRDNAKNTVYLQMNSLKPEDTAVYYCAVTIYTIGDFNYWGQGTQVTVSS

SEQ ID NO: 41461 - protein, 122 aa, Artificial Sequence
  Chemically Synthesized
QVQLQESGGGLVQAGGSLRLSCAASGYISFGKYMGWYRQAPGKERELVATINEGAITNYADSVKGRFTISRDNAKNTVYLQMNSLKPEDTAVYYCAVAYAIYLYTYYALTYWGQGTQVTVSS

SEQ ID NO: 41462 - protein, 122 aa, Artificial Sequence
  Chemically Synthesized
QVQLQESGGGLVQAGGSLRLSCAASGNISRARRMGWYRQAPGKERELVATIAYGGTTYYADSVKGRFTISRDNAKNTVYLQMNSLKPEDTAVYYCAVREITYTFRSRIFTYWGQGTQVTVSS

SEQ ID NO: 41463 - protein, 118 aa, Artificial Sequence
  Chemically Synthesized
QVQLQESGGGLVQAGGSLRLSCAASGYIFPALTMGWYRQAPGKEREFVAGIAGGASTYYADSVKGRFTISRDNAKNTVYLQMNSLKPEDTAVYYCAVDDTDKHAYYYWGQGTQVTVSS

SEQ ID NO: 41464 - protein, 126 aa, Artificial Sequence
  Chemically Synthesized
QVQLQESGGGLVQAGGSLRLSCAASGTISRAYYMGWYRQAPGKERELVAAIALGTTTYYADSVKGRFTISRDNAKNTVYLQMNSLKPEDTAVYYCAAYAYNVAYDYYDYYDDHDYWGQGTQVTVSS

SEQ ID NO: 41465 - protein, 122 aa, Artificial Sequence
  Chemically Synthesized
QVQLQESGGGLVQAGGSLRLSCAASGTISRNTVMGWYRQAPGKEREFVAAIGYGTTTNYADSVKGRFTISRDNAKNTVYLQMNSLKPEDTAVYYCAVVIYDRADSGVRYLYWGQGTQVTVSS

SEQ ID NO: 41466 - protein, 117 aa, Artificial Sequence
  Chemically Synthesized
QVQLQESGGGLVQAGGSLRLSCAASGYIFDTDDMGWYRQAPGKERELVAAIASVLIPYADSVKGRFTISRDNAKNTVYLQMNSLKPEDTAVYYCAAWTNSVDKHSYWGQGTQVTVSS

SEQ ID NO: 41467 - protein, 122 aa, Artificial Sequence
  Chemically Synthesized
QVQLQESGGGLVQAGGSLRLSCAASGTIFGDTVMGWYRQAPGKERELVASITSGGSTNYADSVKGRFTISRDNAKNTVYLQMNSLKPEDTAVYYCAVVDSRRSRGVWPFVYWGQGTQVTVSS

SEQ ID NO: 41468 - protein, 122 aa, Artificial Sequence
  Chemically Synthesized
QVQLQESGGGLVQAGGSLRLSCAASGTISRWRGMGWYRQAPGKERELVASITYGGTTYYADSVKGRFTISRDNAKNTVYLQMNSLKPEDTAVYYCAVYARNVAWWRIYHQYWGQGTQVTVSS

SEQ ID NO: 41469 - protein, 118 aa, Artificial Sequence
  Chemically Synthesized
QVQLQESGGGLVQAGGSLRLSCAASGTISHILTMGWYRQAPGKERELVASISAGTITNYADSVKGRFTISRDNAKNTVYLQMNSLKPEDTAVYYCAAPQLRVGDHLYWGQGTQVTVSS

SEQ ID NO: 41470 - protein, 116 aa, Artificial Sequence
  Chemically Synthesized
QVQLQESGGGLVQAGGSLRLSCAASGSIFLFRGMGWYRQAPGKERELVASIAYGTSTNYADSVKGRFTISRDNAKNTVYLQMNSLKPEDTAVYYCAVYRWYRYVYWGQGTQVTVSS

SEQ ID NO: 41471 - protein, 122 aa, Artificial Sequence
  Chemically Synthesized
QVQLQESGGGLVQAGGSLRLSCAASGSIFDSRDMGWYRQAPGKERELVATIGSGAITYYADSVKGRFTISRDNAKNTVYLQMNSLKPEDTAVYYCAAEDHPSVQSEDDFPYWGQGTQVTVSS

SEQ ID NO: 41472 - protein, 118 aa, Artificial Sequence
  Chemically Synthesized
QVQLQESGGGLVQAGGSLRLSCAASGTIFLRPVMGWYRQAPGKEREFVATIATGASTNYADSVKGRFTISRDNAKNTVYLQMNSLKPEDTAVYYCAAYVLYYGYLTYWGQGTQVTVSS

SEQ ID NO: 41473 - protein, 120 aa, Artificial Sequence
  Chemically Synthesized
QVQLQESGGGLVQAGGSLRLSCAASGTIFTLMGWYRQAPGKERELVAAIDFGTNTNYADSVKGRFTISRDNAKNTVYLQMNSLKPEDTAVYYCAAGSYPGRQDRRPLFYWGQGTQVTVSS

SEQ ID NO: 41474 - protein, 118 aa, Artificial Sequence
  Chemically Synthesized
QVQLQESGGGLVQAGGSLRLSCAASGTIFYNLFMGWYRQAPGKERELVAAIGLGANTNYADSVKGRFTISRDNAKNTVYLQMNSLKPEDTAVYYCAALDSKLVLHGYWGQGTQVTVSS

SEQ ID NO: 41475 - protein, 118 aa, Artificial Sequence
  Chemically Synthesized
QVQLQESGGGLVQAGGSLRLSCAASGTIFGGYVMGWYRQAPGKEREFVAAIADGGITYYADSVKGRFTISRDNAKNTVYLQMNSLKPEDTAVYYCAVAGTDTGDYDYWGQGTQVTVSS

SEQ ID NO: 41476 - protein, 118 aa, Artificial Sequence
  Chemically Synthesized
QVQLQESGGGLVQAGGSLRLSCAASGNISRYNIMGWYRQAPGKEREFVATITPGGTTYYADSVKGRFTISRDNAKNTVYLQMNSLKPEDTAVYYCAATAYGRWWHRYWGQGTQVTVSS

SEQ ID NO: 41477 - protein, 118 aa, Artificial Sequence
  Chemically Synthesized
QVQLQESGGGLVQAGGSLRLSCAASGNISQTGYMGWYRQAPGKEREFVASIATGGITYYADSVKGRFTISRDNAKNTVYLQMNSLKPEDTAVYYCAARALETPQAWYWGQGTQVTVSS

SEQ ID NO: 41478 - protein, 118 aa, Artificial Sequence
  Chemically Synthesized
QVQLQESGGGLVQAGGSLRLSCAASGTIFWRYFMGWYRQAPGKERELVAGIGYGTTTYYADSVKGRFTISRDNAKNTVYLQMNSLKPEDTAVYYCAVGAAGYGWYDYWGQGTQVTVSS

SEQ ID NO: 41479 - protein, 118 aa, Artificial Sequence
  Chemically Synthesized
QVQLQESGGGLVQAGGSLRLSCAASGYIFRILNMGWYRQAPGKERELVATIAVGGNTNYADSVKGRFTISRDNAKNTVYLQMNSLKPEDTAVYYCAVQPYRWLPFTYWGQGTQVTVSS

SEQ ID NO: 41480 - protein, 122 aa, Artificial Sequence
  Chemically Synthesized
QVQLQESGGGLVQAGGSLRLSCAASGNISYHYYMGWYRQAPGKERELVAGIGYGTSTYYADSVKGRFTISRDNAKNTVYLQMNSLKPEDTAVYYCAARGQFYYGGNGGLYYWGQGTQVTVSS

SEQ ID NO: 41481 - protein, 118 aa, Artificial Sequence
  Chemically Synthesized
QVQLQESGGGLVQAGGSLRLSCAASGYISYYYHMGWYRQAPGKERELVAAIGKGSSTYYADSVKGRFTISRDNAKNTVYLQMNSLKPEDTAVYYCAVRKGYYLFHRYWGQGTQVTVSS

SEQ ID NO: 41482 - protein, 118 aa, Artificial Sequence
  Chemically Synthesized
QVQLQESGGGLVQAGGSLRLSCAASGYIFVGAPMGWYRQAPGKEREFVATIGQGATTNYADSVKGRFTISRDNAKNTVYLQMNSLKPEDTAVYYCAVYWTAAWLLRYWGQGTQVTVSS

SEQ ID NO: 41483 - protein, 119 aa, Artificial Sequence
  Chemically Synthesized
QVQLQESGGGLVQAGGSLRLSCAASGSISWPRTMGWYRQAPGKEREFVAAIGRGGSTYYADSVKGRFTISRDNAKNTVYLQMNSLKPEDTAVYYCAVYDRDVYGYFYYWGQGTQVTVSS

SEQ ID NO: 41484 - protein, 122 aa, Artificial Sequence
  Chemically Synthesized
QVQLQESGGGLVQAGGSLRLSCAASGYISYHYWMGWYRQAPGKEREFVAGIGRGTSTYYADSVKGRFTISRDNAKNTVYLQMNSLKPEDTAVYYCAVSDEVYGDRYWAFRYWGQGTQVTVSS

SEQ ID NO: 41485 - protein, 118 aa, Artificial Sequence
  Chemically Synthesized
QVQLQESGGGLVQAGGSLRLSCAASGSISPAAIMGWYRQAPGKEREFVAAINDGATTYYADSVKGRFTISRDNAKNTVYLQMNSLKPEDTAVYYCAVFATVHDRHVYWGQGTQVTVSS

SEQ ID NO: 41486 - protein, 118 aa, Artificial Sequence
  Chemically Synthesized
QVQLQESGGGLVQAGGSLRLSCAASGSIFEQRFMGWYRQAPGKEREFVATIGGGAITNYADSVKGRFTISRDNAKNTVYLQMNSLKPEDTAVYYCAVYWSAVGGHVYWGQGTQVTVSS

SEQ ID NO: 41487 - protein, 118 aa, Artificial Sequence
  Chemically Synthesized
QVQLQESGGGLVQAGGSLRLSCAASGNIFYRVVMGWYRQAPGKEREFVAGIGSGGNTNYADSVKGRFTISRDNAKNTVYLQMNSLKPEDTAVYYCAAFWKYSDYHVYWGQGTQVTVSS

SEQ ID NO: 41488 - protein, 126 aa, Artificial Sequence
  Chemically Synthesized
QVQLQESGGGLVQAGGSLRLSCAASGNISDYYYMGWYRQAPGKERELVASIASGATTNYADSVKGRFTISRDNAKNTVYLQMNSLKPEDTAVYYCAARYLQSRYAVYPDEVNHYYWGQGTQVTVSS

SEQ ID NO: 41489 - protein, 123 aa, Artificial Sequence
  Chemically Synthesized
QVQLQESGGGLVQAGGSLRLSCAASGYIFTYDAMGWYRQAPGKEREFVAGIAYGTTTNYADSVKGRFTISRDNAKNTVYLQMNSLKPEDTAVYYCAVVGYNRYGDSVDLLYYWGQGTQVTVSS

SEQ ID NO: 41490 - protein, 118 aa, Artificial Sequence
  Chemically Synthesized
QVQLQESGGGLVQAGGSLRLSCAASGNISYSIPMGWYRQAPGKEREFVATIAKGSNTNYADSVKGRFTISRDNAKNTVYLQMNSLKPEDTAVYYCAAYKDDTRPLWYWGQGTQVTVSS

SEQ ID NO: 41491 - protein, 122 aa, Artificial Sequence
  Chemically Synthesized
QVQLQESGGGLVQAGGSLRLSCAASGYISHGAVMGWYRQAPGKEREFVAGITTGGTTNYADSVKGRFTISRDNAKNTVYLQMNSLKPEDTAVYYCAVYDPRRWGPSYVLAYWGQGTQVTVSS

SEQ ID NO: 41492 - protein, 118 aa, Artificial Sequence
  Chemically Synthesized
QVQLQESGGGLVQAGGSLRLSCAASGNISPRNGMGWYRQAPGKEREFVAGIDEGTSTYYADSVKGRFTISRDNAKNTVYLQMNSLKPEDTAVYYCAAWSWYRRSHFYWGQGTQVTVSS

SEQ ID NO: 41493 - protein, 122 aa, Artificial Sequence
  Chemically Synthesized
QVQLQESGGGLVQAGGSLRLSCAASGNISDYDAMGWYRQAPGKEREFVAAINPGSSTYYADSVKGRFTISRDNAKNTVYLQMNSLKPEDTAVYYCAAISVLYADAYGLHYYWGQGTQVTVSS

SEQ ID NO: 41494 - protein, 119 aa, Artificial Sequence
  Chemically Synthesized
QVQLQESGGGLVQAGGSLRLSCAASGTISDVSIMGWYRQAPGKEREFVATISGGGSTYYADSVKGRFTISRDNAKNTVYLQMNSLKPEDTAVYYCAVLSYGDDGWYGYWGQGTQVTVSS

SEQ ID NO: 41495 - protein, 122 aa, Artificial Sequence
  Chemically Synthesized
QVQLQESGGGLVQAGGSLRLSCAASGTISRASAMGWYRQAPGKEREFVAGISYGGITNYADSVKGRFTISRDNAKNTVYLQMNSLKPEDTAVYYCAAVDGGDDRRHETFGYWGQGTQVTVSS

SEQ ID NO: 41496 - protein, 122 aa, Artificial Sequence
  Chemically Synthesized
QVQLQESGGGLVQAGGSLRLSCAASGNISGEGIMGWYRQAPGKERELVAGINVGSNTNYADSVKGRFTISRDNAKNTVYLQMNSLKPEDTAVYYCAAFPYYLADAYRQLTYWGQGTQVTVSS

SEQ ID NO: 41497 - protein, 118 aa, Artificial Sequence
  Chemically Synthesized
QVQLQESGGGLVQAGGSLRLSCAASGYIFAWRAMGWYRQAPGKEREFVAGIAQGATTYYADSVKGRFTISRDNAKNTVYLQMNSLKPEDTAVYYCAVSTLDAYYHPYWGQGTQVTVSS

SEQ ID NO: 41498 - protein, 117 aa, Artificial Sequence
  Chemically Synthesized
QVQLQESGGGLVQAGGSLRLSCAASGYIFAYNGMGWYRQAPGKERELVATITNGASTNYADSVKGRFTISRDNAKNTVYLQMNSLKPEDTAVYYCAVQDDWRYHGYWGQGTQVTVSS

SEQ ID NO: 41499 - protein, 118 aa, Artificial Sequence
  Chemically Synthesized
QVQLQESGGGLVQAGGSLRLSCAASGSISARTAMGWYRQAPGKEREFVAGIAGGGITNYADSVKGRFTISRDNAKNTVYLQMNSLKPEDTAVYYCAVVYRYDQYHVYWGQGTQVTVSS

SEQ ID NO: 41500 - protein, 118 aa, Artificial Sequence
  Chemically Synthesized
QVQLQESGGGLVQAGGSLRLSCAASGTISQSTIMGWYRQAPGKEREFVASINDGTNTYYADSVKGRFTISRDNAKNTVYLQMNSLKPEDTAVYYCAVHSTSYDSFWYWGQGTQVTVSS

SEQ ID NO: 41501 - protein, 118 aa, Artificial Sequence
  Chemically Synthesized
QVQLQESGGGLVQAGGSLRLSCAASGSIFIHRAMGWYRQAPGKEREFVAAITKGSTTNYADSVKGRFTISRDNAKNTVYLQMNSLKPEDTAVYYCAAGRTLSRAHYYWGQGTQVTVSS

SEQ ID NO: 41502 - protein, 126 aa, Artificial Sequence
  Chemically Synthesized
QVQLQESGGGLVQAGGSLRLSCAASGTISDISVMGWYRQAPGKEREFVAGIAYGGSTNYADSVKGRFTISRDNAKNTVYLQMNSLKPEDTAVYYCAAVDFEQSDGPGRISGGHAYWGQGTQVTVSS

SEQ ID NO: 41503 - protein, 118 aa, Artificial Sequence
  Chemically Synthesized
QVQLQESGGGLVQAGGSLRLSCAASGYIFPIDSMGWYRQAPGKERELVASIDAGGSTNYADSVKGRFTISRDNAKNTVYLQMNSLKPEDTAVYYCAAGHYTRASFSYWGQGTQVTVSS

SEQ ID NO: 41504 - protein, 118 aa, Artificial Sequence
  Chemically Synthesized
QVQLQESGGGLVQAGGSLRLSCAASGYISHYRWMGWYRQAPGKEREFVAGIARGGITYYADSVKGRFTISRDNAKNTVYLQMNSLKPEDTAVYYCAVHPHRYSAYSYWGQGTQVTVSS

SEQ ID NO: 41505 - protein, 121 aa, Artificial Sequence
  Chemically Synthesized
QVQLQESGGGLVQAGGSLRLSCAASGYIFVDDYMGWYRQAPGKERELVAGIDTGSTTYYADSVKGRFTISRDNAKNTVYLQMNSLKPEDTAVYYCAADESPYISTTVNIYWGQGTQVTVSS

SEQ ID NO: 41506 - protein, 119 aa, Artificial Sequence
  Chemically Synthesized
QVQLQESGGGLVQAGGSLRLSCAASGNISGTAYMGWYRQAPGKEREFVASIDDGAITYYADSVKGRFTISRDNAKNTVYLQMNSLKPEDTAVYYCAAFHPTRKYDHNYWGQGTQVTVSS

SEQ ID NO: 41507 - protein, 118 aa, Artificial Sequence
  Chemically Synthesized
QVQLQESGGGLVQAGGSLRLSCAASGYIFYRVYMGWYRQAPGKERELVATIGHGASTNYADSVKGRFTISRDNAKNTVYLQMNSLKPEDTAVYYCAAGVITSGYHQYWGQGTQVTVSS

SEQ ID NO: 41508 - protein, 122 aa, Artificial Sequence
  Chemically Synthesized
QVQLQESGGGLVQAGGSLRLSCAASGNIFIFTNMGWYRQAPGKEREFVASIGYGSSTNYADSVKGRFTISRDNAKNTVYLQMNSLKPEDTAVYYCAVESSWHQNGYYPHYYWGQGTQVTVSS

SEQ ID NO: 41509 - protein, 118 aa, Artificial Sequence
  Chemically Synthesized
QVQLQESGGGLVQAGGSLRLSCAASGNISYSESMGWYRQAPGKERELVAAITTGATTNYADSVKGRFTISRDNAKNTVYLQMNSLKPEDTAVYYCAAYNVDRLFLDYWGQGTQVTVSS

SEQ ID NO: 41510 - protein, 122 aa, Artificial Sequence
  Chemically Synthesized
QVQLQESGGGLVQAGGSLRLSCAASGYIFYSRYMGWYRQAPGKEREFVAGIAYGASTYYADSVKGRFTISRDNAKNTVYLQMNSLKPEDTAVYYCAVIFRDQYIRRKWLSYWGQGTQVTVSS

SEQ ID NO: 41511 - protein, 122 aa, Artificial Sequence
  Chemically Synthesized
QVQLQESGGGLVQAGGSLRLSCAASGSIFRTPWMGWYRQAPGKERELVATINRGGITNYADSVKGRFTISRDNAKNTVYLQMNSLKPEDTAVYYCAVPYRGYYGPVGAHQYWGQGTQVTVSS

SEQ ID NO: 41512 - protein, 116 aa, Artificial Sequence
  Chemically Synthesized
QVQLQESGGGLVQAGGSLRLSCAASGSIFGSLSMGWYRQAPGKERELVATIAGGTITNYADSVKGRFTISRDNAKNTVYLQMNSLKPEDTAVYYCAANILYGHAYWGQGTQVTVSS

SEQ ID NO: 41513 - protein, 122 aa, Artificial Sequence
  Chemically Synthesized
QVQLQESGGGLVQAGGSLRLSCAASGTISSRAYMGWYRQAPGKEREFVASINSGGSTYYADSVKGRFTISRDNAKNTVYLQMNSLKPEDTAVYYCAVGLYATQPRSVYHRYWGQGTQVTVSS

SEQ ID NO: 41514 - protein, 115 aa, Artificial Sequence
  Chemically Synthesized
QVQLQESGGGLVQAGGSLRLSCAASGNISDRIFMGWYRQAPGKERELVATINLGATTNYADSVKGRFTISRDNAKNTVYLQMNSLKPEDTAVYYCAAAYIPFTYWGQGTQVTVSS

SEQ ID NO: 41515 - protein, 122 aa, Artificial Sequence
  Chemically Synthesized
QVQLQESGGGLVQAGGSLRLSCAASGTISGLGTMGWYRQAPGKERELVASITVGANTYYADSVKGRFTISRDNAKNTVYLQMNSLKPEDTAVYYCAVYIYAWYTWPVLYIYWGQGTQVTVSS

SEQ ID NO: 41516 - protein, 122 aa, Artificial Sequence
  Chemically Synthesized
QVQLQESGGGLVQAGGSLRLSCAASGNISVGELMGWYRQAPGKERELVAAITAGTNTYYADSVKGRFTISRDNAKNTVYLQMNSLKPEDTAVYYCAALISYDGRAAVGHWYWGQGTQVTVSS

SEQ ID NO: 41517 - protein, 109 aa, Artificial Sequence
  Chemically Synthesized
QVQLQESGGGLVQAGGSLRLSCAASGNIFEGYEMGWYRQAPGKEREFVAGISGGTTTYYADSVKGRFTISRDNAKNTVYLQMNSLKPEDTAVYYCAVYWGQGTQVTVSS

SEQ ID NO: 41518 - protein, 123 aa, Artificial Sequence
  Chemically Synthesized
QVQLQESGGGLVQAGGSLRLSCAASGSIFDIHIMGWYRQAPGKEREFVATIAGGSSTYYADSVKGRFTISRDNAKNTVYLQMNSLKPEDTAVYYCAAGRYDSNANNPAWLVYWGQGTQVTVSS

SEQ ID NO: 41519 - protein, 118 aa, Artificial Sequence
  Chemically Synthesized
QVQLQESGGGLVQAGGSLRLSCAASGTISRKYKMGWYRQAPGKERELVAGIGTGSITYYADSVKGRFTISRDNAKNTVYLQMNSLKPEDTAVYYCAARARYRYGYVYWGQGTQVTVSS

SEQ ID NO: 41520 - protein, 121 aa, Artificial Sequence
  Chemically Synthesized
QVQLQESGGGLVQAGGSLRLSCAASGSISVLYTMGWYRQAPGKEREFVAGISSGGTTNYADSVKGRFTISRDNAKNTVYLQMNSLKPEDTAVYYCAVTGQNVINIWDTHYWGQGTQVTVSS

SEQ ID NO: 41521 - protein, 117 aa, Artificial Sequence
  Chemically Synthesized
QVQLQESGGGLVQAGGSLRLSCAASGTISSSFRMGWYRQAPGKEREFVATIGSGSSTYYADSVKGRFTISRDNAKNTVYLQMNSLKPEDTAVYYCAAGSLLVTNFYWGQGTQVTVSS

SEQ ID NO: 41522 - protein, 122 aa, Artificial Sequence
  Chemically Synthesized
QVQLQESGGGLVQAGGSLRLSCAASGNIFTGQYMGWYRQAPGKERELVASIGLGTITYYADSVKGRFTISRDNAKNTVYLQMNSLKPEDTAVYYCAAGITDLFNYVDRHQYWGQGTQVTVSS

SEQ ID NO: 41523 - protein, 118 aa, Artificial Sequence
  Chemically Synthesized
QVQLQESGGGLVQAGGSLRLSCAASGNISSRRGMGWYRQAPGKEREFVAGINYGAITNYADSVKGRFTISRDNAKNTVYLQMNSLKPEDTAVYYCAVRRYLSSTHGYWGQGTQVTVSS

SEQ ID NO: 41524 - protein, 118 aa, Artificial Sequence
  Chemically Synthesized
QVQLQESGGGLVQAGGSLRLSCAASGNISKRLPMGWYRQAPGKEREFVAAISYGGNTYYADSVKGRFTISRDNAKNTVYLQMNSLKPEDTAVYYCAVLRRTELYYVYWGQGTQVTVSS

SEQ ID NO: 41525 - protein, 117 aa, Artificial Sequence
  Chemically Synthesized
QVQLQESGGGLVQAGGSLRLSCAASGNIFYYKDMGWYRQAPGKEREFLPVLVTVVLPYADSVKGRFTISRDNAKNTVYLQMNSLKPEDTAVYYCAVGGYYLYNLPYWGQGTQVTVSS

SEQ ID NO: 41526 - protein, 118 aa, Artificial Sequence
  Chemically Synthesized
QVQLQESGGGLVQAGGSLRLSCAASGTIFPDSLMGWYRQAPGKEREFVATITLGTSTYYADSVKGRFTISRDNAKNTVYLQMNSLKPEDTAVYYCAAVKFGSQWHAYWGQGTQVTVSS

SEQ ID NO: 41527 - protein, 113 aa, Artificial Sequence
  Chemically Synthesized
QVQLQESGGGLVQAGGSLRLSCAASGSIFAGDNMGWYRQAPGKERELVATITGGTTYYADSVKGRFTISRDNAKNTVYLQMNSLKPEDTAVYYCAVGDTYQYWGQGTQVTVSS

SEQ ID NO: 41528 - protein, 122 aa, Artificial Sequence
  Chemically Synthesized
QVQLQESGGGLVQAGGSLRLSCAASGTIFWWYYMGWYRQAPGKEREFVAAIAWGGNTNYADSVKGRFTISRDNAKNTVYLQMNSLKPEDTAVYYCAASLYLPRASPLFHRYWGQGTQVTVSS

SEQ ID NO: 41529 - protein, 126 aa, Artificial Sequence
  Chemically Synthesized
QVQLQESGGGLVQAGGSLRLSCAASGNIFYLQLMGWYRQAPGKEREFVATISDGASTYYADSVKGRFTISRDNAKNTVYLQMNSLKPEDTAVYYCAAYYILYTYTKRTEATVYYYWGQGTQVTVSS

SEQ ID NO: 41530 - protein, 122 aa, Artificial Sequence
  Chemically Synthesized
QVQLQESGGGLVQAGGSLRLSCAASGYISGYDAMGWYRQAPGKEREFVAGIAGGTSTNYADSVKGRFTISRDNAKNTVYLQMNSLKPEDTAVYYCAVLSRHRNNDGLYFLYWGQGTQVTVSS

SEQ ID NO: 41531 - protein, 126 aa, Artificial Sequence
  Chemically Synthesized
QVQLQESGGGLVQAGGSLRLSCAASGTIFSVTYMGWYRQAPGKEREFVAAITSGGITNYADSVKGRFTISRDNAKNTVYLQMNSLKPEDTAVYYCAAVRRYQYTLLRDHGGAHLYWGQGTQVTVSS

SEQ ID NO: 41532 - protein, 122 aa, Artificial Sequence
  Chemically Synthesized
QVQLQESGGGLVQAGGSLRLSCAASGTIFPVDWMGWYRQAPGKEREFVATIGDGSSTYYADSVKGRFTISRDNAKNTVYLQMNSLKPEDTAVYYCAVYFLHTYDGTPAYVYWGQGTQVTVSS

SEQ ID NO: 41533 - protein, 125 aa, Artificial Sequence
  Chemically Synthesized
QVQLQESGGGLVQAGGSLRLSCAASGSIFDPGVMGWYRQAPGKEREFVAAIASGTTTNYADSVKGRFTISRDNAKNTVYLQMNSLKPEDTAVYYCAVIVVYYGDTLEPGAIHGYWGQGTQVTVSS

SEQ ID NO: 41534 - protein, 118 aa, Artificial Sequence
  Chemically Synthesized
QVQLQESGGGLVQAGGSLRLSCAASGSISGARIMGWYRQAPGKERELVASIARGGITNYADSVKGRFTISRDNAKNTVYLQMNSLKPEDTAVYYCAVKSRIWSRLYYWGQGTQVTVSS

SEQ ID NO: 41535 - protein, 122 aa, Artificial Sequence
  Chemically Synthesized
QVQLQESGGGLVQAGGSLRLSCAASGTIFNNYTMGWYRQAPGKERELVATIGYGGSTYYADSVKGRFTISRDNAKNTVYLQMNSLKPEDTAVYYCAAYTNYDRAHTGGHHYWGQGTQVTVSS

SEQ ID NO: 41536 - protein, 126 aa, Artificial Sequence
  Chemically Synthesized
QVQLQESGGGLVQAGGSLRLSCAASGSIFDHPIMGWYRQAPGKERELVASISEGASTNYADSVKGRFTISRDNAKNTVYLQMNSLKPEDTAVYYCAVNRWYADRLQYAGYNYLDYWGQGTQVTVSS

SEQ ID NO: 41537 - protein, 122 aa, Artificial Sequence
  Chemically Synthesized
QVQLQESGGGLVQAGGSLRLSCAASGNISYQTVMGWYRQAPGKERELVAGIAIGSSTYYADSVKGRFTISRDNAKNTVYLQMNSLKPEDTAVYYCAVWYATADTREYRYIYWGQGTQVTVSS

SEQ ID NO: 41538 - protein, 122 aa, Artificial Sequence
  Chemically Synthesized
QVQLQESGGGLVQAGGSLRLSCAASGYISSFGAMGWYRQAPGKEREFVAAIGAGANTYYADSVKGRFTISRDNAKNTVYLQMNSLKPEDTAVYYCAVGGYYGGRSDRAYYYWGQGTQVTVSS

SEQ ID NO: 41539 - protein, 122 aa, Artificial Sequence
  Chemically Synthesized
QVQLQESGGGLVQAGGSLRLSCAASGNIFPSDYMGWYRQAPGKERELVAAITGGSITYYADSVKGRFTISRDNAKNTVYLQMNSLKPEDTAVYYCAAFGTVGYSGPRSLTYWGQGTQVTVSS

SEQ ID NO: 41540 - protein, 118 aa, Artificial Sequence
  Chemically Synthesized
QVQLQESGGGLVQAGGSLRLSCAASGSIFYYRWMGWYRQAPGKEREFVASITRGTTTNYADSVKGRFTISRDNAKNTVYLQMNSLKPEDTAVYYCAVYQYRWYGLPYWGQGTQVTVSS

SEQ ID NO: 41541 - protein, 126 aa, Artificial Sequence
  Chemically Synthesized
QVQLQESGGGLVQAGGSLRLSCAASGNISSYQIMGWYRQAPGKERELVASIDPGGITYYADSVKGRFTISRDNAKNTVYLQMNSLKPEDTAVYYCAVLWIYARAYTSLSADYHLYWGQGTQVTVSS

SEQ ID NO: 41542 - protein, 121 aa, Artificial Sequence
  Chemically Synthesized
QVQLQESGGGLVQAGGSLRLSCAASGSISDRYYMGWYRQAPGKERELVAGIGDGSITNYADSVKGRFTISRDNAKNTVYLQMNSLKPEDTAVYYCAATHLDTTVHGIYNYWGQGTQVTVSS

SEQ ID NO: 41543 - protein, 117 aa, Artificial Sequence
  Chemically Synthesized
QVQLQESGGGLVQAGGSLRLSCAASGTIFGYRFMGWYRQAPGKERELVATLITVLVPYADSVKGRFTISRDNAKNTVYLQMNSLKPEDTAVYYCAALQRDDDGFNYWGQGTQVTVSS

SEQ ID NO: 41544 - protein, 126 aa, Artificial Sequence
  Chemically Synthesized
QVQLQESGGGLVQAGGSLRLSCAASGYIFRPDHMGWYRQAPGKERELVAAIGWGSSTYYADSVKGRFTISRDNAKNTVYLQMNSLKPEDTAVYYCAVYYLPQEYDAANAVYDYYYWGQGTQVTVSS

SEQ ID NO: 41545 - protein, 126 aa, Artificial Sequence
  Chemically Synthesized
QVQLQESGGGLVQAGGSLRLSCAASGSISGARAMGWYRQAPGKERELVAAIGTGTNTNYADSVKGRFTISRDNAKNTVYLQMNSLKPEDTAVYYCAVAYRRTLWSWYTDEYFHSYWGQGTQVTVSS

SEQ ID NO: 41546 - protein, 118 aa, Artificial Sequence
  Chemically Synthesized
QVQLQESGGGLVQAGGSLRLSCAASGTISPPVRMGWYRQAPGKEREFVAAINLGGSTNYADSVKGRFTISRDNAKNTVYLQMNSLKPEDTAVYYCAVTYHPLADHAYWGQGTQVTVSS

SEQ ID NO: 41547 - protein, 119 aa, Artificial Sequence
  Chemically Synthesized
QVQLQESGGGLVQAGGSLRLSCAASGTISPPVWMGWYRQAPGKEREFVAGITRGTSTNYADSVKGRFTISRDNAKNTVYLQMNSLKPEDTAVYYCAAGEFAGYAVHLYWGQGTQVTVSS

SEQ ID NO: 41548 - protein, 118 aa, Artificial Sequence
  Chemically Synthesized
QVQLQESGGGLVQAGGSLRLSCAASGTISDYDYMGWYRQAPGKEREFVAAIDYGSNTNYADSVKGRFTISRDNAKNTVYLQMNSLKPEDTAVYYCAALWWSYLHHPYWGQGTQVTVSS

SEQ ID NO: 41549 - protein, 118 aa, Artificial Sequence
  Chemically Synthesized
QVQLQESGGGLVQAGGSLRLSCAASGTISSAQVMGWYRQAPGKEREFVAAIAPGASTNYADSVKGRFTISRDNAKNTVYLQMNSLKPEDTAVYYCAALWIAQGVHAYWGQGTQVTVSS

SEQ ID NO: 41550 - protein, 118 aa, Artificial Sequence
  Chemically Synthesized
QVQLQESGGGLVQAGGSLRLSCAASGSISGSGTMGWYRQAPGKERELVATISGGAITYYADSVKGRFTISRDNAKNTVYLQMNSLKPEDTAVYYCAATDVSAGTHAYWGQGTQVTVSS

SEQ ID NO: 41551 - protein, 126 aa, Artificial Sequence
  Chemically Synthesized
QVQLQESGGGLVQAGGSLRLSCAASGNIFGSDVMGWYRQAPGKEREFVASINRGGTTYYADSVKGRFTISRDNAKNTVYLQMNSLKPEDTAVYYCAVYERLLGGRPTDDDWTYLYWGQGTQVTVSS

SEQ ID NO: 41552 - protein, 126 aa, Artificial Sequence
  Chemically Synthesized
QVQLQESGGGLVQAGGSLRLSCAASGNIFLRPTMGWYRQAPGKEREFVAGISYGASTNYADSVKGRFTISRDNAKNTVYLQMNSLKPEDTAVYYCAVITLPGWKDAYYYARYLYYWGQGTQVTVSS

SEQ ID NO: 41553 - protein, 110 aa, Artificial Sequence
  Chemically Synthesized
QVQLQESGGGLVQAGGSLRLSCAASGNISAFLDMGWYRQAPGKERELVAGIGYGAITNYADSVKGRFTISRDNAKNTVYLQMNSLKPEDTAVYYCAYPYWGQGTQVTVSS

SEQ ID NO: 41554 - protein, 121 aa, Artificial Sequence
  Chemically Synthesized
QVQLQESGGGLVQAGGSLRLSCAASGSIFRTGMGWYRQAPGKERELVAAIAVGTTTNYADSVKGRFTISRDNAKNTVYLQMNSLKPEDTAVYYCAADDEPYYYVTWNLRYWGQGTQVTVSS

SEQ ID NO: 41555 - protein, 118 aa, Artificial Sequence
  Chemically Synthesized
QVQLQESGGGLVQAGGSLRLSCAASGSISYGYQMGWYRQAPGKERELVAAIDAGGTTYYADSVKGRFTISRDNAKNTVYLQMNSLKPEDTAVYYCAVYPPPRWYHTYWGQGTQVTVSS

SEQ ID NO: 41556 - protein, 118 aa, Artificial Sequence
  Chemically Synthesized
QVQLQESGGGLVQAGGSLRLSCAASGSIFYVFNMGWYRQAPGKEREFVATISRGANTYYADSVKGRFTISRDNAKNTVYLQMNSLKPEDTAVYYCAAWRWPFSWYSYWGQGTQVTVSS

SEQ ID NO: 41557 - protein, 118 aa, Artificial Sequence
  Chemically Synthesized
QVQLQESGGGLVQAGGSLRLSCAASGYISYSFGMGWYRQAPGKEREFVAGIGDGGNTYYADSVKGRFTISRDNAKNTVYLQMNSLKPEDTAVYYCAVQQGFDGDLYYWGQGTQVTVSS

SEQ ID NO: 41558 - protein, 123 aa, Artificial Sequence
  Chemically Synthesized
QVQLQESGGGLVQAGGSLRLSCAASGNISFKTSMGWYRQAPGKEREFVAGIAAGGTITNYADSVKGRFTISRDNAKNTVYLQMNSLKPEDTAVYYCAADNFDRPGAYYGHAYWGQGTQVTVSS

SEQ ID NO: 41559 - protein, 109 aa, Artificial Sequence
  Chemically Synthesized
QVQLQESGGGLVQAGGSLRLSCAASGSISAFVQMGWYRQAPGKEREFVASIARGTTTNYADSVKGRFTISRDNAKNTVYLQMNSLKPEDTAVYYCAVYWGQGTQVTVSS

SEQ ID NO: 41560 - protein, 122 aa, Artificial Sequence
  Chemically Synthesized
QVQLQESGGGLVQAGGSLRLSCAASGTIFYWTSMGWYRQAPGKERELVAAIAVGGSTNYADSVKGRFTISRDNAKNTVYLQMNSLKPEDTAVYYCAAPLTYQFLRYGLYAYWGQGTQVTVSS

SEQ ID NO: 41561 - protein, 117 aa, Artificial Sequence
  Chemically Synthesized
QVQLQESGGGLVQAGGSLRLSCAASGYISYLQFMGWYRQAPGKEREFVASINYGTSTNYADSVKGRFTISRDNAKNTVYLQMNSLKPEDTAVYYCAVPNNRAYALYWGQGTQVTVSS

SEQ ID NO: 41562 - protein, 117 aa, Artificial Sequence
  Chemically Synthesized
QVQLQESGGGLVQAGGSLRLSCAASGTILLCTMGWYRQAPGKEREFVATIGAGGTTYYADSVKGRFTISRDNAKNTVYLQMNSLKPEDTAVYYCAVADFDYGLYDYWGQGTQVTVSS

SEQ ID NO: 41563 - protein, 114 aa, Artificial Sequence
  Chemically Synthesized
QVQLQESGGGLVQAGGSLRLSCAASGTIFISREMGWYRQAPGKEREFVAAIDYGGSTNYADSVKGRFTISRDNAKNTVYLQMNSLKPEDTAVYYCAARNYFWYWGQGTQVTVSS

SEQ ID NO: 41564 - protein, 118 aa, Artificial Sequence
  Chemically Synthesized
QVQLQESGGGLVQAGGSLRLSCAASGTIFGRHRMGWYRQAPGKEREFVAGIDYGTSTNYADSVKGRFTISRDNAKNTVYLQMNSLKPEDTAVYYCAVYPYIRWKYLYWGQGTQVTVSS

SEQ ID NO: 41565 - protein, 118 aa, Artificial Sequence
  Chemically Synthesized
QVQLQESGGGLVQAGGSLRLSCAASGTIFAYYVMGWYRQAPGKERELVAAITEGTSTYYADSVKGRFTISRDNAKNTVYLQMNSLKPEDTAVYYCAAYGFYGRWYSYWGQGTQVTVSS

SEQ ID NO: 41566 - protein, 122 aa, Artificial Sequence
  Chemically Synthesized
QVQLQESGGGLVQAGGSLRLSCAASGSIFIRRYMGWYRQAPGKERELVAAISRGTNTNYADSVKGRFTISRDNAKNTVYLQMNSLKPEDTAVYYCAAWRYKPYHYDDWHPYWGQGTQVTVSS

SEQ ID NO: 41567 - protein, 126 aa, Artificial Sequence
  Chemically Synthesized
QVQLQESGGGLVQAGGSLRLSCAASGTIFGRYHMGWYRQAPGKEREFVASIAEGGSTNYADSVKGRFTISRDNAKNTVYLQMNSLKPEDTAVYYCAVYSRNLPWFVPSDIFSHAYWGQGTQVTVSS

SEQ ID NO: 41568 - protein, 130 aa, Artificial Sequence
  Chemically Synthesized
QVQLQESGGGLVQAGGSLRLSCAASGSISRYRRMGWYRQAPGKEREFVASITGSSTYYADSVKGRFTISRDNAKNTVYLQMNSLKPEDTAVYYCAATKYQSRPNDAYPYYNYRKWGHSYWGQGTQVTVSS

SEQ ID NO: 41569 - protein, 118 aa, Artificial Sequence
  Chemically Synthesized
QVQLQESGGGLVQAGGSLRLSCAASGSISAIPYMGWYRQAPGKEREFVASINFGGITNYADSVKGRFTISRDNAKNTVYLQMNSLKPEDTAVYYCAAAWRRWYYHRYWGQGTQVTVSS

SEQ ID NO: 41570 - protein, 118 aa, Artificial Sequence
  Chemically Synthesized
QVQLQESGGGLVQAGGSLRLSCAASGTISDTHPMGWYRQAPGKERELVAGIAYGSSTYYADSVKGRFTISRDNAKNTVYLQMNSLKPEDTAVYYCAVYWGRAKDYDYWGQGTQVTVSS

SEQ ID NO: 41571 - protein, 126 aa, Artificial Sequence
  Chemically Synthesized
QVQLQESGGGLVQAGGSLRLSCAASGNISTPFYMGWYRQAPGKEREFVAAIAYGTSTNYADSVKGRFTISRDNAKNTVYLQMNSLKPEDTAVYYCAAPDVTPLSDYTDAWPYYAYWGQGTQVTVSS

SEQ ID NO: 41572 - protein, 122 aa, Artificial Sequence
  Chemically Synthesized
QVQLQESGGGLVQAGGSLRLSCAASGYISLVLYMGWYRQAPGKEREFVAAIGYGAITNYADSVKGRFTISRDNAKNTVYLQMNSLKPEDTAVYYCAAIVLDSNTARRVYQYWGQGTQVTVSS

SEQ ID NO: 41573 - protein, 118 aa, Artificial Sequence
  Chemically Synthesized
QVQLQESGGGLVQAGGSLRLSCAASGYISYFPVMGWYRQAPGKEREFVATINYGGNTNYADSVKGRFTISRDNAKNTVYLQMNSLKPEDTAVYYCAARDWFRYTFYYWGQGTQVTVSS

SEQ ID NO: 41574 - protein, 122 aa, Artificial Sequence
  Chemically Synthesized
QVQLQESGGGLVQAGGSLRLSCAASGNISTDADMGWYRQAPGKERELVAGIDSGSTTNYADSVKGRFTISRDNAKNTVYLQMNSLKPEDTAVYYCAVYIRNNNDTYYYHAYWGQGTQVTVSS

SEQ ID NO: 41575 - protein, 122 aa, Artificial Sequence
  Chemically Synthesized
QVQLQESGGGLVQAGGSLRLSCAASGSIFGSYDMGWYRQAPGKEREFVAAISRGSSTYYADSVKGRFTISRDNAKNTVYLQMNSLKPEDTAVYYCAVYATSDAWIQYYFAYWGQGTQVTVSS

SEQ ID NO: 41576 - protein, 118 aa, Artificial Sequence
  Chemically Synthesized
QVQLQESGGGLVQAGGSLRLSCAASGNIFSDGVMGWYRQAPGKEREFVAGITPGTTTNYADSVKGRFTISRDNAKNTVYLQMNSLKPEDTAVYYCAALLKHNYYHSYWGQGTQVTVSS

SEQ ID NO: 41577 - protein, 118 aa, Artificial Sequence
  Chemically Synthesized
QVQLQESGGGLVQAGGSLRLSCAASGYIFLPRLMGWYRQAPGKERELVATIGRGTSTNYADSVKGRFTISRDNAKNTVYLQMNSLKPEDTAVYYCAVYVRYFSTHAYWGQGTQVTVSS

SEQ ID NO: 41578 - protein, 118 aa, Artificial Sequence
  Chemically Synthesized
QVQLQESGGGLVQAGGSLRLSCAASGTISLYPLMGWYRQAPGKEREFVAGITYGGTTYYADSVKGRFTISRDNAKNTVYLQMNSLKPEDTAVYYCAVVWQRYTRYYYWGQGTQVTVSS

SEQ ID NO: 41579 - protein, 118 aa, Artificial Sequence
  Chemically Synthesized
QVQLQESGGGLVQAGGSLRLSCAASGNISDRYKMGWYRQAPGKERELVAGIGSGTSTNYADSVKGRFTISRDNAKNTVYLQMNSLKPEDTAVYYCAVERRVTVTHPYWGQGTQVTVSS

SEQ ID NO: 41580 - protein, 126 aa, Artificial Sequence
  Chemically Synthesized
QVQLQESGGGLVQAGGSLRLSCAASGSIFSRRTMGWYRQAPGKERELVATISLGGSTYYADSVKGRFTISRDNAKNTVYLQMNSLKPEDTAVYYCAAWYINYYSARERPVPQHRYWGQGTQVTVSS

SEQ ID NO: 41581 - protein, 118 aa, Artificial Sequence
  Chemically Synthesized
QVQLQESGGGLVQAGGSLRLSCAASGYISLVHWMGWYRQAPGKERELVATITGGANTNYADSVKGRFTISRDNAKNTVYLQMNSLKPEDTAVYYCAAPAYQQRYLPYWGQGTQVTVSS

SEQ ID NO: 41582 - protein, 118 aa, Artificial Sequence
  Chemically Synthesized
QVQLQESGGGLVQAGGSLRLSCAASGTIFPRGRMGWYRQAPGKEREFVAGIAYGSTTYYADSVKGRFTISRDNAKNTVYLQMNSLKPEDTAVYYCAAKSYLIAKFVYWGQGTQVTVSS

SEQ ID NO: 41583 - protein, 118 aa, Artificial Sequence
  Chemically Synthesized
QVQLQESGGGLVQAGGSLRLSCAASGTISPYDDMGWYRQAPGKEREFVASINYGAITNYADSVKGRFTISRDNAKNTVYLQMNSLKPEDTAVYYCAVIVRGDYYLYYWGQGTQVTVSS

SEQ ID NO: 41584 - protein, 121 aa, Artificial Sequence
  Chemically Synthesized
QVQLQESGGGLVQAGGSLRLSCAASGTIFSYRRMGWYRQAPGKERELVASINTGTNTNYADSVKGRFTISRDNAKNTVYLQMNSLKPEDTAVYYCAVAVGTVDLRSTFFYWGQGTQVTVSS

SEQ ID NO: 41585 - protein, 118 aa, Artificial Sequence
  Chemically Synthesized
QVQLQESGGGLVQAGGSLRLSCAASGYIFRVGAMGWYRQAPGKEREFVAAITRGANTNYADSVKGRFTISRDNAKNTVYLQMNSLKPEDTAVYYCAARSRVAYYHPYWGQGTQVTVSS

SEQ ID NO: 41586 - protein, 118 aa, Artificial Sequence
  Chemically Synthesized
QVQLQESGGGLVQAGGSLRLSCAASGSIFVRPYMGWYRQAPGKEREFVAAIGRGATTYYADSVKGRFTISRDNAKNTVYLQMNSLKPEDTAVYYCAAGRYWLGALRYWGQGTQVTVSS

SEQ ID NO: 41587 - protein, 115 aa, Artificial Sequence
  Chemically Synthesized
QVQLQESGGGLVQAGGSLRLSCAASGTIWVMGWYRQAPGKERELVASINYGSNTYYADSVKGRFTISRDNAKNTVYLQMNSLKPEDTAVYYCAVPYTSSLGHIYWGQGTQVTVSS

SEQ ID NO: 41588 - protein, 120 aa, Artificial Sequence
  Chemically Synthesized
QVQLQESGGGLVQAGGSLRLSCAASGYISGAFMGWYRQAPGKEREFVASIDSVVVPYADSVKGRFTISRDNAKNTVYLQMNSLKPEDTAVYYCAAGQLYGYQSDASLDYWGQGTQVTVSS

SEQ ID NO: 41589 - protein, 122 aa, Artificial Sequence
  Chemically Synthesized
QVQLQESGGGLVQAGGSLRLSCAASGNISRDDYMGWYRQAPGKEREFVAAIGAGATTYYADSVKGRFTISRDNAKNTVYLQMNSLKPEDTAVYYCAAFELFWDDSSDAHGYWGQGTQVTVSS

SEQ ID NO: 41590 - protein, 124 aa, Artificial Sequence
  Chemically Synthesized
QVQLQESGGGLVQAGGSLRLSCAASGTISSAVMGWYRQAPGKEREFVATIGYGTSTYYADSVKGRFTISRDNAKNTVYLQMNSLKPEDTAVYYCAADTILYYRESNIYLGHRYWGQGTQVTVSS

SEQ ID NO: 41591 - protein, 117 aa, Artificial Sequence
  Chemically Synthesized
QVQLQESGGGLVQAGGSLRLSCAASGYISQVWDMGWYRQAPGKEREFVAAIASVVLPYADSVKGRFTISRDNAKNTVYLQMNSLKPEDTAVYYCAATVNQYYDFSYWGQGTQVTVSS

SEQ ID NO: 41592 - protein, 121 aa, Artificial Sequence
  Chemically Synthesized
QVQLQESGGGLVQAGGSLRLSCAASGTISVPVMGWYRQAPGKEREFVAAISVGSSTNYADSVKGRFTISRDNAKNTVYLQMNSLKPEDTAVYYCAASYVYGNDGPYLFGYWGQGTQVTVSS

SEQ ID NO: 41593 - protein, 126 aa, Artificial Sequence
  Chemically Synthesized
QVQLQESGGGLVQAGGSLRLSCAASGTISQWSYMGWYRQAPGKERELVASITWGANTYYADSVKGRFTISRDNAKNTVYLQMNSLKPEDTAVYYCAVYLLRQFLQAYFGVPYFPYWGQGTQVTVSS

SEQ ID NO: 41594 - protein, 121 aa, Artificial Sequence
  Chemically Synthesized
QVQLQESGGGLVQAGGSLRLSCAASGSISSYYLMGWYRQAPGKEREFVASISFGTTTNYADSVKGRFTISRDNAKNTVYLQMNSLKPEDTAVYYCAADALTYLYPYAHRYWGQGTQVTVSS

SEQ ID NO: 41595 - protein, 118 aa, Artificial Sequence
  Chemically Synthesized
QVQLQESGGGLVQAGGSLRLSCAASGNIFHRYYMGWYRQAPGKEREFVASITYGGNTYYADSVKGRFTISRDNAKNTVYLQMNSLKPEDTAVYYCAVYWQSISYFVYWGQGTQVTVSS

SEQ ID NO: 41596 - protein, 118 aa, Artificial Sequence
  Chemically Synthesized
QVQLQESGGGLVQAGGSLRLSCAASGTISRVWLMGWYRQAPGKERELVASISYGGTTNYADSVKGRFTISRDNAKNTVYLQMNSLKPEDTAVYYCAAFAPWWGLHLYWGQGTQVTVSS

SEQ ID NO: 41597 - protein, 118 aa, Artificial Sequence
  Chemically Synthesized
QVQLQESGGGLVQAGGSLRLSCAASGNISILNSMGWYRQAPGKERELVAGINYGAITNYADSVKGRFTISRDNAKNTVYLQMNSLKPEDTAVYYCAVYAYVRAPYAYWGQGTQVTVSS

SEQ ID NO: 41598 - protein, 122 aa, Artificial Sequence
  Chemically Synthesized
QVQLQESGGGLVQAGGSLRLSCAASGNISSLDLMGWYRQAPGKERELVAAITAGGTTNYADSVKGRFTISRDNAKNTVYLQMNSLKPEDTAVYYCAVYGYYYPFTVRTHKYWGQGTQVTVSS

SEQ ID NO: 41599 - protein, 122 aa, Artificial Sequence
  Chemically Synthesized
QVQLQESGGGLVQAGGSLRLSCAASGSIFGWYYMGWYRQAPGKERELVAAIDVGASTNYADSVKGRFTISRDNAKNTVYLQMNSLKPEDTAVYYCAVYALWYYYDRLFFTYWGQGTQVTVSS

SEQ ID NO: 41600 - protein, 119 aa, Artificial Sequence
  Chemically Synthesized
QVQLQESGGGLVQAGGSLRLSCAASGTIFRYFTMGWYRQAPGKERELVASIGVGTTTYYADSVKGRFTISRDNAKNTVYLQMNSLKPEDTAVYYCAAYIYTTPTYHGYWGQGTQVTVSS

SEQ ID NO: 41601 - protein, 118 aa, Artificial Sequence
  Chemically Synthesized
QVQLQESGGGLVQAGGSLRLSCAASGTIFAYIFMGWYRQAPGKERELVAGIAFGSITNYADSVKGRFTISRDNAKNTVYLQMNSLKPEDTAVYYCAVPVIGDYHHYYWGQGTQVTVSS

SEQ ID NO: 41602 - protein, 111 aa, Artificial Sequence
  Chemically Synthesized
QVQLQESGGGLVQAGGSLRLSCAASGTISLTDFMGWYRQAPGKERELVASISYGGNTNYADSVKGRFTISRDNAKNTVYLQMNSLKPEDTAVYYCATSMYWGQGTQVTVSS

SEQ ID NO: 41603 - protein, 122 aa, Artificial Sequence
  Chemically Synthesized
QVQLQESGGGLVQAGGSLRLSCAASGYISLPRTMGWYRQAPGKEREFVASIADGSTTYYADSVKGRFTISRDNAKNTVYLQMNSLKPEDTAVYYCAAGLLAANPYVGYYLYWGQGTQVTVSS

SEQ ID NO: 41604 - protein, 118 aa, Artificial Sequence
  Chemically Synthesized
QVQLQESGGGLVQAGGSLRLSCAASGSIFDVNYMGWYRQAPGKERELVAAIDYGTTTNYADSVKGRFTISRDNAKNTVYLQMNSLKPEDTAVYYCAAELDGRYYLGYWGQGTQVTVSS

SEQ ID NO: 41605 - protein, 118 aa, Artificial Sequence
  Chemically Synthesized
QVQLQESGGGLVQAGGSLRLSCAASGTIFTVIIMGWYRQAPGKEREFVAAIGPGSITYYADSVKGRFTISRDNAKNTVYLQMNSLKPEDTAVYYCAAYAYDGIFFVYWGQGTQVTVSS

SEQ ID NO: 41606 - protein, 122 aa, Artificial Sequence
  Chemically Synthesized
QVQLQESGGGLVQAGGSLRLSCAASGTISSLYYMGWYRQAPGKERELVATITVGTSTNYADSVKGRFTISRDNAKNTVYLQMNSLKPEDTAVYYCAATAVNVAYSSLIHTYWGQGTQVTVSS

SEQ ID NO: 41607 - protein, 122 aa, Artificial Sequence
  Chemically Synthesized
QVQLQESGGGLVQAGGSLRLSCAASGYIFRPWPMGWYRQAPGKERELVASIGYGGTTYYADSVKGRFTISRDNAKNTVYLQMNSLKPEDTAVYYCAVLYIRHYTPTYDHDYWGQGTQVTVSS

SEQ ID NO: 41608 - protein, 118 aa, Artificial Sequence
  Chemically Synthesized
QVQLQESGGGLVQAGGSLRLSCAASGNIFRYRDMGWYRQAPGKERELVATINTGTSTNYADSVKGRFTISRDNAKNTVYLQMNSLKPEDTAVYYCAVADDDYGKHIYWGQGTQVTVSS

SEQ ID NO: 41609 - protein, 117 aa, Artificial Sequence
  Chemically Synthesized
QVQLQESGGGLVQAGGSLRLSCAASGTIFNVFSMGWYRQAPGKERELVASITYGSNTNYADSVKGRFTISRDNAKNTVYLQMNSLKPEDTAVYYCAAGLRSRSTFYWGQGTQVTVSS

SEQ ID NO: 41610 - protein, 118 aa, Artificial Sequence
  Chemically Synthesized
QVQLQESGGGLVQAGGSLRLSCAASGTISRATYMGWYRQAPGKERELVASITWGANTYYADSVKGRFTISRDNAKNTVYLQMNSLKPEDTAVYYCAAGYDYIYYHVYWGQGTQVTVSS

SEQ ID NO: 41611 - protein, 117 aa, Artificial Sequence
  Chemically Synthesized
QVQLQESGGGLVQAGGSLRLSCAASGSISYYEYMGWYRQAPGKERELVASIAYGGTTNYADSVKGRFTISRDNAKNTVYLQMNSLKPEDTAVYYCAVVVSSVVGMYWGQGTQVTVSS

SEQ ID NO: 41612 - protein, 126 aa, Artificial Sequence
  Chemically Synthesized
QVQLQESGGGLVQAGGSLRLSCAASGTISRQVKMGWYRQAPGKERELVAAISYGTNTYYADSVKGRFTISRDNAKNTVYLQMNSLKPEDTAVYYCAVGNYGRGVRKDPYDVGYYYWGQGTQVTVSS

SEQ ID NO: 41613 - protein, 118 aa, Artificial Sequence
  Chemically Synthesized
QVQLQESGGGLVQAGGSLRLSCAASGTIFAGRRMGWYRQAPGKEREFVAGITGGGITYYADSVKGRFTISRDNAKNTVYLQMNSLKPEDTAVYYCAVRYWSTFYHLYWGQGTQVTVSS

SEQ ID NO: 41614 - protein, 121 aa, Artificial Sequence
  Chemically Synthesized
QVQLQESGGGLVQAGGSLRLSCAASGSISSGPYMGWYRQAPGKERELVAIDVGGITNYADSVKGRFTISRDNAKNTVYLQMNSLKPEDTAVYYCAVSVRATTTGTPVYSYWGQGTQVTVSS

SEQ ID NO: 41615 - protein, 118 aa, Artificial Sequence
  Chemically Synthesized
QVQLQESGGGLVQAGGSLRLSCAASGSIFYVLFMGWYRQAPGKERELVATITFGGNTNYADSVKGRFTISRDNAKNTVYLQMNSLKPEDTAVYYCAVRVFDGQGYQYWGQGTQVTVSS

SEQ ID NO: 41616 - protein, 122 aa, Artificial Sequence
  Chemically Synthesized
QVQLQESGGGLVQAGGSLRLSCAASGYISRYYAMGWYRQAPGKEREFVASIAIGGNTYYADSVKGRFTISRDNAKNTVYLQMNSLKPEDTAVYYCAATLFGLRYYPKYFGYWGQGTQVTVSS

SEQ ID NO: 41617 - protein, 117 aa, Artificial Sequence
  Chemically Synthesized
QVQLQESGGGLVQAGGSLRLSCAASGSFLVTLMGWYRQAPGKEREFVASISAGSTTNYADSVKGRFTISRDNAKNTVYLQMNSLKPEDTAVYYCAVYRPVVGSHHYWGQGTQVTVSS

SEQ ID NO: 41618 - protein, 114 aa, Artificial Sequence
  Chemically Synthesized
QVQLQESGGGLVQAGGSLRLSCAASGTLLMGWYRQAPGKEREFVAGISTGSTTYYADSVKGRFTISRDNAKNTVYLQMNSLKPEDTAVYYCAVDADSYYYLPYWGQGTQVTVSS

SEQ ID NO: 41619 - protein, 118 aa, Artificial Sequence
  Chemically Synthesized
QVQLQESGGGLVQAGGSLRLSCAASGNISGYTYMGWYRQAPGKEREFVATIAAGANTYYADSVKGRFTISRDNAKNTVYLQMNSLKPEDTAVYYCAAVQRPRASHGYWGQGTQVTVSS

SEQ ID NO: 41620 - protein, 118 aa, Artificial Sequence
  Chemically Synthesized
QVQLQESGGGLVQAGGSLRLSCAASGTIFVRDTMGWYRQAPGKERELVATIGGGASTYYADSVKGRFTISRDNAKNTVYLQMNSLKPEDTAVYYCAADAYGVRVHSYWGQGTQVTVSS

SEQ ID NO: 41621 - protein, 122 aa, Artificial Sequence
  Chemically Synthesized
QVQLQESGGGLVQAGGSLRLSCAASGNISALDVMGWYRQAPGKERELVAAISSGGSTYYADSVKGRFTISRDNAKNTVYLQMNSLKPEDTAVYYCAVNDVYIGYGYYFHAYWGQGTQVTVSS

SEQ ID NO: 41622 - protein, 122 aa, Artificial Sequence
  Chemically Synthesized
QVQLQESGGGLVQAGGSLRLSCAASGNIFRWTTMGWYRQAPGKERELVATIDRGAITNYADSVKGRFTISRDNAKNTVYLQMNSLKPEDTAVYYCAVLVALSGHPIDRLSYWGQGTQVTVSS

SEQ ID NO: 41623 - protein, 118 aa, Artificial Sequence
  Chemically Synthesized
QVQLQESGGGLVQAGGSLRLSCAASGTIFDHLTMGWYRQAPGKEREFVAAIGVGTTTNYADSVKGRFTISRDNAKNTVYLQMNSLKPEDTAVYYCAAYDFIGTDHPYWGQGTQVTVSS

SEQ ID NO: 41624 - protein, 118 aa, Artificial Sequence
  Chemically Synthesized
QVQLQESGGGLVQAGGSLRLSCAASGYISDYFYMGWYRQAPGKERELVATINTGGITYYADSVKGRFTISRDNAKNTVYLQMNSLKPEDTAVYYCAARTYHWYIYSYWGQGTQVTVSS

SEQ ID NO: 41625 - protein, 121 aa, Artificial Sequence
  Chemically Synthesized
QVQLQESGGGLVQAGGSLRLSCAASGSIFPSYTMGWYRQAPGKEREFVATISTGTNTYYADSVKGRFTISRDNAKNTVYLQMNSLKPEDTAVYYCAAQTSTLTSLLTTIYWGQGTQVTVSS

SEQ ID NO: 41626 - protein, 125 aa, Artificial Sequence
  Chemically Synthesized
QVQLQESGGGLVQAGGSLRLSCAASGNISTLTIMGWYRQAPGKERELVAGISPGSNTYYADSVKGRFTISRDNAKNTVYLQMNSLKPEDTAVYYCAVTRTPTGYEVYDGQAYRYWGQGTQVTVSS

SEQ ID NO: 41627 - protein, 109 aa, Artificial Sequence
  Chemically Synthesized
QVQLQESGGGLVQAGGSLRLSCAASGNISVRAAMGWYRQAPGKEREFVAAIGDGGNTYYADSVKGRFTISRDNAKNTVYLQMNSLKPEDTAVYYCAAYWGQGTQVTVSS

SEQ ID NO: 41628 - protein, 125 aa, Artificial Sequence
  Chemically Synthesized
QVQLQESGGGLVQAGGSLRLSCAASGNISSRDHMGWYRQAPGKERELVAGINTGGSTNYADSVKGRFTISRDNAKNTVYLQMNSLKPEDTAVYYCAAGPAQLVDGRTTVFTTMYWGQGTQVTVSS

SEQ ID NO: 41629 - protein, 118 aa, Artificial Sequence
  Chemically Synthesized
QVQLQESGGGLVQAGGSLRLSCAASGSISYSDAMGWYRQAPGKERELVATIDGGTTTNYADSVKGRFTISRDNAKNTVYLQMNSLKPEDTAVYYCAVTPYFGYHYAYWGQGTQVTVSS

SEQ ID NO: 41630 - protein, 122 aa, Artificial Sequence
  Chemically Synthesized
QVQLQESGGGLVQAGGSLRLSCAASGTISDQDQMGWYRQAPGKERELVATIDIGASTYYADSVKGRFTISRDNAKNTVYLQMNSLKPEDTAVYYCAAGGYGQYYFAPYHQYWGQGTQVTVSS

SEQ ID NO: 41631 - protein, 121 aa, Artificial Sequence
  Chemically Synthesized
QVQLQESGGGLVQAGGSLRLSCAASGTISGEKIMGWYRQAPGKEREFVAAIDRGATTYYADSVKGRFTISRDNAKNTVYLQMNSLKPEDTAVYYCAVSGTTLRRLVTTMYWGQGTQVTVSS

SEQ ID NO: 41632 - protein, 122 aa, Artificial Sequence
  Chemically Synthesized
QVQLQESGGGLVQAGGSLRLSCAASGNISVVRAMGWYRQAPGKEREFVAAINYGSITNYADSVKGRFTISRDNAKNTVYLQMNSLKPEDTAVYYCAVPYYYLPQYNRVHVYWGQGTQVTVSS

SEQ ID NO: 41633 - protein, 122 aa, Artificial Sequence
  Chemically Synthesized
QVQLQESGGGLVQAGGSLRLSCAASGTIFYVRAMGWYRQAPGKEREFVATINGGSTTYYADSVKGRFTISRDNAKNTVYLQMNSLKPEDTAVYYCAVDGGYDANTDLDHQYWGQGTQVTVSS

SEQ ID NO: 41634 - protein, 122 aa, Artificial Sequence
  Chemically Synthesized
QVQLQESGGGLVQAGGSLRLSCAASGTISGGRYMGWYRQAPGKERELVAAIAPGATTYYADSVKGRFTISRDNAKNTVYLQMNSLKPEDTAVYYCAVYYRPVYRDHYYFIYWGQGTQVTVSS

SEQ ID NO: 41635 - protein, 118 aa, Artificial Sequence
  Chemically Synthesized
QVQLQESGGGLVQAGGSLRLSCAASGYISIDDVMGWYRQAPGKERELVASIDDGGSTNYADSVKGRFTISRDNAKNTVYLQMNSLKPEDTAVYYCAAVVAADRYHLYWGQGTQVTVSS

SEQ ID NO: 41636 - protein, 118 aa, Artificial Sequence
  Chemically Synthesized
QVQLQESGGGLVQAGGSLRLSCAASGSISTPSPMGWYRQAPGKEREFVAAIGTGANTNYADSVKGRFTISRDNAKNTVYLQMNSLKPEDTAVYYCAALWTTGYYHLYWGQGTQVTVSS

SEQ ID NO: 41637 - protein, 127 aa, Artificial Sequence
  Chemically Synthesized
QVQLQESGGGLVQAGGSLRLSCAASGYISLRGRHMGWYRQAPGKEREFVASIAPGGSTNYADSVKGRFTISRDNAKNTVYLQMNSLKPEDTAVYYCAVAYWSTGYATRHWWIQHAYWGQGTQVTVSS

SEQ ID NO: 41638 - protein, 122 aa, Artificial Sequence
  Chemically Synthesized
QVQLQESGGGLVQAGGSLRLSCAASGTISGTWYMGWYRQAPGKERELVAAISPGTSTYYADSVKGRFTISRDNAKNTVYLQMNSLKPEDTAVYYCAAYRRAYGKGSGGHSYWGQGTQVTVSS

SEQ ID NO: 41639 - protein, 114 aa, Artificial Sequence
  Chemically Synthesized
QVQLQESGGGLVQAGGSLRLSCAASGTISYRYMGWYRQAPGKERELVATIAPGATTYYADSVKGRFTISRDNAKNTVYLQMNSLKPEDTAVYYCAVFLGGHQYWGQGTQVTVSS

SEQ ID NO: 41640 - protein, 122 aa, Artificial Sequence
  Chemically Synthesized
QVQLQESGGGLVQAGGSLRLSCAASGNISSRRYMGWYRQAPGKERELVAAINDGSNTNYADSVKGRFTISRDNAKNTVYLQMNSLKPEDTAVYYCAVYWRSYSENYVYYIYWGQGTQVTVSS

SEQ ID NO: 41641 - protein, 118 aa, Artificial Sequence
  Chemically Synthesized
QVQLQESGGGLVQAGGSLRLSCAASGSISIHVGMGWYRQAPGKERELVAGISFGAITNYADSVKGRFTISRDNAKNTVYLQMNSLKPEDTAVYYCAVVPTDTNYLYYWGQGTQVTVSS

SEQ ID NO: 41642 - protein, 118 aa, Artificial Sequence
  Chemically Synthesized
QVQLQESGGGLVQAGGSLRLSCAASGTIFPGWRMGWYRQAPGKEREFVAAIAAGGSTNYADSVKGRFTISRDNAKNTVYLQMNSLKPEDTAVYYCAARTVPGYRLTYWGQGTQVTVSS

SEQ ID NO: 41643 - protein, 118 aa, Artificial Sequence
  Chemically Synthesized
QVQLQESGGGLVQAGGSLRLSCAASGTISLSYYMGWYRQAPGKERELVAAINDGTSTYYADSVKGRFTISRDNAKNTVYLQMNSLKPEDTAVYYCAAYKDGQPGHFYWGQGTQVTVSS

SEQ ID NO: 41644 - protein, 118 aa, Artificial Sequence
  Chemically Synthesized
QVQLQESGGGLVQAGGSLRLSCAASGYIFTWYPMGWYRQAPGKERELVATIAHGGNTYYADSVKGRFTISRDNAKNTVYLQMNSLKPEDTAVYYCAVPLAGQIDYPYWGQGTQVTVSS

SEQ ID NO: 41645 - protein, 110 aa, Artificial Sequence
  Chemically Synthesized
QVQLQESGGGLVQAGGSLRLSCAASGNISEPSDMGWYRQAPGKERELVASIGDGGITNYADSVKGRFTISRDNAKNTVYLQMNSLKPEDTAVYYCAHVYWGQGTQVTVSS

SEQ ID NO: 41646 - protein, 120 aa, Artificial Sequence
  Chemically Synthesized
QVQLQESGGGLVQAGGSLRLSCAASGNISDAYFMGWYRQAPGKERELVATIGHGAITNYADSVKGRFTISRDNAKNTVYLQMNSLKPEDTAVYYCAAVDYYGTPRDLEYWGQGTQVTVSS

SEQ ID NO: 41647 - protein, 122 aa, Artificial Sequence
  Chemically Synthesized
QVQLQESGGGLVQAGGSLRLSCAASGTISLGYYMGWYRQAPGKERELVAAIAYGGNTYYADSVKGRFTISRDNAKNTVYLQMNSLKPEDTAVYYCAVYYKVYEYDGLYHFYWGQGTQVTVSS

SEQ ID NO: 41648 - protein, 126 aa, Artificial Sequence
  Chemically Synthesized
QVQLQESGGGLVQAGGSLRLSCAASGYISGWFGMGWYRQAPGKERELVAAITQGASTNYADSVKGRFTISRDNAKNTVYLQMNSLKPEDTAVYYCAVRVGRDYRRYPIDWAEYTYWGQGTQVTVSS

SEQ ID NO: 41649 - protein, 122 aa, Artificial Sequence
  Chemically Synthesized
QVQLQESGGGLVQAGGSLRLSCAASGSISDATYMGWYRQAPGKERELVAAITYGGTTYYADSVKGRFTISRDNAKNTVYLQMNSLKPEDTAVYYCAAYVQVYYSTIIALLYWGQGTQVTVSS

SEQ ID NO: 41650 - protein, 122 aa, Artificial Sequence
  Chemically Synthesized
QVQLQESGGGLVQAGGSLRLSCAASGNISPYTYMGWYRQAPGKEREFVASIDYGGNTYYADSVKGRFTISRDNAKNTVYLQMNSLKPEDTAVYYCAVYSPRYSPRWGYHQYWGQGTQVTVSS

SEQ ID NO: 41651 - protein, 119 aa, Artificial Sequence
  Chemically Synthesized
QVQLQESGGGLVQAGGSLRLSCAASGSISIGGSMGWYRQAPGKERELVATISYGSNTYYADSVKGRFTISRDNAKNTVYLQMNSLKPEDTAVYYCAALTPYDYRAYAYWGQGTQVTVSS

SEQ ID NO: 41652 - protein, 126 aa, Artificial Sequence
  Chemically Synthesized
QVQLQESGGGLVQAGGSLRLSCAASGNIFEARAMGWYRQAPGKERELVATINLGSSTNYADSVKGRFTISRDNAKNTVYLQMNSLKPEDTAVYYCAVNGPDYGLNQHYDDDAHYYWGQGTQVTVSS

SEQ ID NO: 41653 - protein, 118 aa, Artificial Sequence
  Chemically Synthesized
QVQLQESGGGLVQAGGSLRLSCAASGSIFYHYYMGWYRQAPGKERELVAGITAGSITYYADSVKGRFTISRDNAKNTVYLQMNSLKPEDTAVYYCAAPYLERSALPYWGQGTQVTVSS

SEQ ID NO: 41654 - protein, 117 aa, Artificial Sequence
  Chemically Synthesized
QVQLQESGGGLVQAGGSLRLSCAASGSISGKQAMGWYRQAPGKEREFVAGITSVLLPYADSVKGRFTISRDNAKNTVYLQMNSLKPEDTAVYYCAVYKRSDDYHAYWGQGTQVTVSS

SEQ ID NO: 41655 - protein, 122 aa, Artificial Sequence
  Chemically Synthesized
QVQLQESGGGLVQAGGSLRLSCAASGTISEGSPMGWYRQAPGKEREFVASIGSGANTYYADSVKGRFTISRDNAKNTVYLQMNSLKPEDTAVYYCAVPWLIIYETGGVLVYWGQGTQVTVSS

SEQ ID NO: 41656 - protein, 118 aa, Artificial Sequence
  Chemically Synthesized
QVQLQESGGGLVQAGGSLRLSCAASGTIFALLYMGWYRQAPGKERELVAAISRGSSTYYADSVKGRFTISRDNAKNTVYLQMNSLKPEDTAVYYCAVSPPAWTYFYYWGQGTQVTVSS

SEQ ID NO: 41657 - protein, 122 aa, Artificial Sequence
  Chemically Synthesized
QVQLQESGGGLVQAGGSLRLSCAASGSISTAYYMGWYRQAPGKERELVAAISDGGSTYYADSVKGRFTISRDNAKNTVYLQMNSLKPEDTAVYYCAAYGWDLDGDYDGYLYWGQGTQVTVSS

SEQ ID NO: 41658 - protein, 122 aa, Artificial Sequence
  Chemically Synthesized
QVQLQESGGGLVQAGGSLRLSCAASGSIFGRYYMGWYRQAPGKERELVAAIATGGTTYYADSVKGRFTISRDNAKNTVYLQMNSLKPEDTAVYYCAAYNGPTGHRSYIHLYWGQGTQVTVSS

SEQ ID NO: 41659 - protein, 126 aa, Artificial Sequence
  Chemically Synthesized
QVQLQESGGGLVQAGGSLRLSCAASGSISAVGDMGWYRQAPGKEREFVAAINGGGTTYYADSVKGRFTISRDNAKNTVYLQMNSLKPEDTAVYYCAAISSARVTEYGRGYWYHYYWGQGTQVTVSS

SEQ ID NO: 41660 - protein, 120 aa, Artificial Sequence
  Chemically Synthesized
QVQLQESGGGLVQAGGSLRLSCAASGYIFLLLMGWYRQAPGKERELVAGIGYGTTTNYADSVKGRFTISRDNAKNTVYLQMNSLKPEDTAVYYCAARYYYPGWPSYYGYWGQGTQVTVSS

SEQ ID NO: 41661 - protein, 114 aa, Artificial Sequence
  Chemically Synthesized
QVQLQESGGGLVQAGGSLRLSCAASGHCLMGWYRQAPGKEREFVASITLGGNTYYADSVKGRFTISRDNAKNTVYLQMNSLKPEDTAVYYCAVEVRYYAYFDYWGQGTQVTVSS

SEQ ID NO: 41662 - protein, 121 aa, Artificial Sequence
  Chemically Synthesized
QVQLQESGGGLVQAGGSLRLSCAASGNISGLSVMGWYRQAPGKEREFVAGIDQGASTNYADSVKGRFTISRDNAKNTVYLQMNSLKPEDTAVYYCAVGLSDDEIYHNYHYWGQGTQVTVSS

SEQ ID NO: 41663 - protein, 122 aa, Artificial Sequence
  Chemically Synthesized
QVQLQESGGGLVQAGGSLRLSCAASGSIFPGDYMGWYRQAPGKEREFVAGIDYGGSTNYADSVKGRFTISRDNAKNTVYLQMNSLKPEDTAVYYCAADRGQATDSLPSHDYWGQGTQVTVSS

SEQ ID NO: 41664 - protein, 126 aa, Artificial Sequence
  Chemically Synthesized
QVQLQESGGGLVQAGGSLRLSCAASGTIFADYDMGWYRQAPGKEREFVAGITSGGSTNYADSVKGRFTISRDNAKNTVYLQMNSLKPEDTAVYYCAVRPEDDDYLTVAQPPVHGYWGQGTQVTVSS

SEQ ID NO: 41665 - protein, 117 aa, Artificial Sequence
  Chemically Synthesized
QVQLQESGGGLVQAGGSLRLSCAASGTISASDSMGWYRQAPGKERELVASITVGATTNYADSVKGRFTISRDNAKNTVYLQMNSLKPEDTAVYYCAAGAYSNSYDYWGQGTQVTVSS

SEQ ID NO: 41666 - protein, 117 aa, Artificial Sequence
  Chemically Synthesized
QVQLQESGGGLVQAGGSLRLSCAASGNISYGHMGWYRQAPGKEREFVASINYGTTTYYADSVKGRFTISRDNAKNTVYLQMNSLKPEDTAVYYCAAYRDAHSPHPYWGQGTQVTVSS

SEQ ID NO: 41667 - protein, 113 aa, Artificial Sequence
  Chemically Synthesized
QVQLQESGGGLVQAGGSLRLSCAASGNIFYISAMGWYRQAPGKERELVAASTNYADSVKGRFTISRDNAKNTVYLQMNSLKPEDTAVYYCAANYQLNFGYPYWGQGTQVTVSS

SEQ ID NO: 41668 - protein, 113 aa, Artificial Sequence
  Chemically Synthesized
QVQLQESGGGLVQAGGSLRLSCAASGNISVRDDMGWYRQAPGKERELVASINYGASTYYADSVKGRFTISRDNAKNTVYLQMNSLKPEDTAVYYCAVLTNFYWGQGTQVTVSS

SEQ ID NO: 41669 - protein, 118 aa, Artificial Sequence
  Chemically Synthesized
QVQLQESGGGLVQAGGSLRLSCAASGTISDYAIMGWYRQAPGKERELVATIAVGTNTNYADSVKGRFTISRDNAKNTVYLQMNSLKPEDTAVYYCAVTDYISSSHDYWGQGTQVTVSS

SEQ ID NO: 41670 - protein, 121 aa, Artificial Sequence
  Chemically Synthesized
QVQLQESGGGLVQAGGSLRLSCAASGTIFDPRMGWYRQAPGKERELVAGIGTGSTTNYADSVKGRFTISRDNAKNTVYLQMNSLKPEDTAVYYCAVLAYRLYLYAADFVYWGQGTQVTVSS

SEQ ID NO: 41671 - protein, 117 aa, Artificial Sequence
  Chemically Synthesized
QVQLQESGGGLVQAGGSLRLSCAASGNISVFPMGWYRQAPGKEREFVAAIGHGSTTYYADSVKGRFTISRDNAKNTVYLQMNSLKPEDTAVYYCAAPYEGGRYYDYWGQGTQVTVSS

SEQ ID NO: 41672 - protein, 117 aa, Artificial Sequence
  Chemically Synthesized
QVQLQESGGGLVQAGGSLRLSCAASGYIFTTTMGWYRQAPGKERELVATINRGGSTNYADSVKGRFTISRDNAKNTVYLQMNSLKPEDTAVYYCAVNDLFIPVHVYWGQGTQVTVSS

SEQ ID NO: 41673 - protein, 121 aa, Artificial Sequence
  Chemically Synthesized
QVQLQESGGGLVQAGGSLRLSCAASGNIFRVYYMGWYRQAPGKERELVAAITRGASTNYADSVKGRFTISRDNAKNTVYLQMNSLKPEDTAVYYCALTTSLTTLSRLLFYWGQGTQVTVSS

SEQ ID NO: 41674 - protein, 122 aa, Artificial Sequence
  Chemically Synthesized
QVQLQESGGGLVQAGGSLRLSCAASGYIFGDWVMGWYRQAPGKERELVATIAYGTNTNYADSVKGRFTISRDNAKNTVYLQMNSLKPEDTAVYYCAVDPSYPYVYYWSHRYWGQGTQVTVSS

SEQ ID NO: 41675 - protein, 118 aa, Artificial Sequence
  Chemically Synthesized
QVQLQESGGGLVQAGGSLRLSCAASGSIFTRVYMGWYRQAPGKERELVASIGPGGTTYYADSVKGRFTISRDNAKNTVYLQMNSLKPEDTAVYYCAAPFKQGRPHVYWGQGTQVTVSS

SEQ ID NO: 41676 - protein, 119 aa, Artificial Sequence
  Chemically Synthesized
QVQLQESGGGLVQAGGSLRLSCAASGNISWPKDMGWYRQAPGKERELVAAIASGGTTNYADSVKGRFTISRDNAKNTVYLQMNSLKPEDTAVYYCAAGNWGGRYAGYYWGQGTQVTVSS

SEQ ID NO: 41677 - protein, 117 aa, Artificial Sequence
  Chemically Synthesized
QVQLQESGGGLVQAGGSLRLSCAASGNISSFSMGWYRQAPGKEREFVAGITYGATTYYADSVKGRFTISRDNAKNTVYLQMNSLKPEDTAVYYCAVRPFYSYHYSYWGQGTQVTVSS

SEQ ID NO: 41678 - protein, 117 aa, Artificial Sequence
  Chemically Synthesized
QVQLQESGGGLVQAGGSLRLSCAASGYIFLILMGWYRQAPGKEREFVATILLPYADSVKGRFTISRDNAKNTVYLQMNSLKPEDTAVYYCAATYVSRYAYDYGHAYWGQGTQVTVSS

SEQ ID NO: 41679 - protein, 122 aa, Artificial Sequence
  Chemically Synthesized
QVQLQESGGGLVQAGGSLRLSCAASGNIFYYWSMGWYRQAPGKERELVATIDTGTTTNYADSVKGRFTISRDNAKNTVYLQMNSLKPEDTAVYYCAVDWFTGPRRSGTYGYWGQGTQVTVSS

SEQ ID NO: 41680 - protein, 122 aa, Artificial Sequence
  Chemically Synthesized
QVQLQESGGGLVQAGGSLRLSCAASGTISPDYDMGWYRQAPGKEREFVASISVGGNTNYADSVKGRFTISRDNAKNTVYLQMNSLKPEDTAVYYCAVYDYAWYGIYPWYDYWGQGTQVTVSS

SEQ ID NO: 41681 - protein, 118 aa, Artificial Sequence
  Chemically Synthesized
QVQLQESGGGLVQAGGSLRLSCAASGNISRFYVMGWYRQAPGKEREFVATITFGTNTYYADSVKGRFTISRDNAKNTVYLQMNSLKPEDTAVYYCAVRYPYGGYYIYWGQGTQVTVSS

SEQ ID NO: 41682 - protein, 124 aa, Artificial Sequence
  Chemically Synthesized
QVQLQESGGGLVQAGGSLRLSCAASGTIFSEYYMGWYRQAPGKERELVAGLLWVVLPYADSVKGRFTISRDNAKNTVYLQMNSLKPEDTAVYYCAVFVSGRPDGSESSLIHSYWGQGTQVTVSS

SEQ ID NO: 41683 - protein, 118 aa, Artificial Sequence
  Chemically Synthesized
QVQLQESGGGLVQAGGSLRLSCAASGTIFAFLLMGWYRQAPGKERELVATIDYGATTNYADSVKGRFTISRDNAKNTVYLQMNSLKPEDTAVYYCAVWYVLYDLHNYWGQGTQVTVSS

SEQ ID NO: 41684 - protein, 124 aa, Artificial Sequence
  Chemically Synthesized
QVQLQESGGGLVQAGGSLRLSCAASGSISTDDAMGWYRQAPGKEREFVATINGGASTNYADSVKGRFTISRDNAKNTVYLQMNSLKPEDTAVYYCAVTQGYQYLLPTNARFPYWGQGTQVTVSS

SEQ ID NO: 41685 - protein, 118 aa, Artificial Sequence
  Chemically Synthesized
QVQLQESGGGLVQAGGSLRLSCAASGTISSHLVMGWYRQAPGKERELVAAIDGGGNTNYADSVKGRFTISRDNAKNTVYLQMNSLKPEDTAVYYCAVPVIAYYHYYYWGQGTQVTVSS

SEQ ID NO: 41686 - protein, 120 aa, Artificial Sequence
  Chemically Synthesized
QVQLQESGGGLVQAGGSLRLSCAASGSISGLWAMGWYRQAPGKERELPLLITVLLPYADSVKGRFTISRDNAKNTVYLQMNSLKPEDTAVYYCAVLDTAYQTWESAHRYWGQGTQVTVSS

SEQ ID NO: 41687 - protein, 126 aa, Artificial Sequence
  Chemically Synthesized
QVQLQESGGGLVQAGGSLRLSCAASGSISYDDYMGWYRQAPGKERELVAGINYGAYYQYADSVKGRFTISRDNAKNTVYLQMNSLKPEDTAVYYCAARTRSYGGPANRTWYFHWYWGQGTQVTVSS

SEQ ID NO: 41688 - protein, 118 aa, Artificial Sequence
  Chemically Synthesized
QVQLQESGGGLVQAGGSLRLSCAASGSIFAYNRMGWYRQAPGKERELVASIGGGGTTYYADSVKGRFTISRDNAKNTVYLQMNSLKPEDTAVYYCAADNWFVERYPYWGQGTQVTVSS

SEQ ID NO: 41689 - protein, 118 aa, Artificial Sequence
  Chemically Synthesized
QVQLQESGGGLVQAGGSLRLSCAASGNISGRYAMGWYRQAPGKERELVATISRGGTTYYADSVKGRFTISRDNAKNTVYLQMNSLKPEDTAVYYCAVYTVYGRYHYYWGQGTQVTVSS

SEQ ID NO: 41690 - protein, 118 aa, Artificial Sequence
  Chemically Synthesized
QVQLQESGGGLVQAGGSLRLSCAASGTIFTLYAMGWYRQAPGKEREFVATIARGASTYYADSVKGRFTISRDNAKNTVYLQMNSLKPEDTAVYYCAVARHYLALLTYWGQGTQVTVSS

SEQ ID NO: 41691 - protein, 118 aa, Artificial Sequence
  Chemically Synthesized
QVQLQESGGGLVQAGGSLRLSCAASGNISDRNRMGWYRQAPGKEREFVASIAYGTSTYYADSVKGRFTISRDNAKNTVYLQMNSLKPEDTAVYYCAVYVYIQTYYRYWGQGTQVTVSS

SEQ ID NO: 41692 - protein, 121 aa, Artificial Sequence
  Chemically Synthesized
QVQLQESGGGLVQAGGSLRLSCAASGIFLTTSMGWYRQAPGKEREFVAGINSGASTNYADSVKGRFTISRDNAKNTVYLQMNSLKPEDTAVYYCAAPGGVRRDGTYIFPYWGQGTQVTVSS

SEQ ID NO: 41693 - protein, 122 aa, Artificial Sequence
  Chemically Synthesized
QVQLQESGGGLVQAGGSLRLSCAASGSISKPDYMGWYRQAPGKERELVATIGDGGITNYADSVKGRFTISRDNAKNTVYLQMNSLKPEDTAVYYCAVWYWRYSGLSDRFQYWGQGTQVTVSS

SEQ ID NO: 41694 - protein, 120 aa, Artificial Sequence
  Chemically Synthesized
QVQLQESGGGLVQAGGSLRLSCAASGNISRYAYMGWYRQAPGKEREFVAGITRGATTYYADSVKGRFTISRDNAKNTVYLQMNSLKPEDTAVYYCAARDTSSLLKNTCYWGQGTQVTVSS

SEQ ID NO: 41695 - protein, 109 aa, Artificial Sequence
  Chemically Synthesized
QVQLQESGGGLVQAGGSLRLSCAASGTIFGYFEMGWYRQAPGKEREFVASITSGANTNYADSVKGRFTISRDNAKNTVYLQMNSLKPEDTAVYYCADYWGQGTQVTVSS

SEQ ID NO: 41696 - protein, 109 aa, Artificial Sequence
  Chemically Synthesized
QVQLQESGGGLVQAGGSLRLSCAASGSIFYRPHMGWYRQAPGKEREFVAGIDYGGTTNYADSVKGRFTISRDNAKNTVYLQMNSLKPEDTAVYYCAAYWGQGTQVTVSS

SEQ ID NO: 41697 - protein, 121 aa, Artificial Sequence
  Chemically Synthesized
QVQLQESGGGLVQAGGSLRLSCAASGNIFQSYMGWYRQAPGKEREFVAAIGTGSTTNYADSVKGRFTISRDNAKNTVYLQMNSLKPEDTAVYYCAADYPQYLNIGGYHNYWGQGTQVTVSS

SEQ ID NO: 41698 - protein, 122 aa, Artificial Sequence
  Chemically Synthesized
QVQLQESGGGLVQAGGSLRLSCAASGYISLDDIMGWYRQAPGKEREFVAAINRGTTTNYADSVKGRFTISRDNAKNTVYLQMNSLKPEDTAVYYCAVGLPTGSGRGYQHWYWGQGTQVTVSS

SEQ ID NO: 41699 - protein, 118 aa, Artificial Sequence
  Chemically Synthesized
QVQLQESGGGLVQAGGSLRLSCAASGYIFRDVYMGWYRQAPGKERELVAAISFGGITYYADSVKGRFTISRDNAKNTVYLQMNSLKPEDTAVYYCAVSYDEHSEFYYWGQGTQVTVSS

SEQ ID NO: 41700 - protein, 125 aa, Artificial Sequence
  Chemically Synthesized
QVQLQESGGGLVQAGGSLRLSCAASGSIFYYYYMGWYRQAPGKERELVASIGAGGITNYADSVKGRFTISRDNAKNTVYLQMNSLKPEDTAVYYCAAYDQAEQQVYRYGGPYFYWGQGTQVTVSS

SEQ ID NO: 41701 - protein, 121 aa, Artificial Sequence
  Chemically Synthesized
QVQLQESGGGLVQAGGSLRLSCAASGTISDYYSMGWYRQAPGKERELVASIILVLLPYADSVKGRFTISRDNAKNTVYLQMNSLKPEDTAVYYCAVNYDSRLNDATSYQYWGQGTQVTVSS

SEQ ID NO: 41702 - protein, 118 aa, Artificial Sequence
  Chemically Synthesized
QVQLQESGGGLVQAGGSLRLSCAASGNIFYSYVMGWYRQAPGKERELVAAISSGGNTYYADSVKGRFTISRDNAKNTVYLQMNSLKPEDTAVYYCAAGQRSNSWHPYWGQGTQVTVSS

SEQ ID NO: 41703 - protein, 122 aa, Artificial Sequence
  Chemically Synthesized
QVQLQESGGGLVQAGGSLRLSCAASGTIFRYSVMGWYRQAPGKERELVAAINSGTTTYYADSVKGRFTISRDNAKNTVYLQMNSLKPEDTAVYYCAVPSYSPVRPRDTHVYWGQGTQVTVSS

SEQ ID NO: 41704 - protein, 118 aa, Artificial Sequence
  Chemically Synthesized
QVQLQESGGGLVQAGGSLRLSCAASGTIFDARDMGWYRQAPGKERELVATISQGGITNYADSVKGRFTISRDNAKNTVYLQMNSLKPEDTAVYYCAAQEPGTYAHEYWGQGTQVTVSS

SEQ ID NO: 41705 - protein, 118 aa, Artificial Sequence
  Chemically Synthesized
QVQLQESGGGLVQAGGSLRLSCAASGNISYDYFMGWYRQAPGKEREFVASIAQGSSTYYADSVKGRFTISRDNAKNTVYLQMNSLKPEDTAVYYCAVYVSTLKDFAYWGQGTQVTVSS

SEQ ID NO: 41706 - protein, 122 aa, Artificial Sequence
  Chemically Synthesized
QVQLQESGGGLVQAGGSLRLSCAASGNIFYYRRMGWYRQAPGKERELVASIARGANTNYADSVKGRFTISRDNAKNTVYLQMNSLKPEDTAVYYCAVGGVKSLVSYTLYPYWGQGTQVTVSS

SEQ ID NO: 41707 - protein, 117 aa, Artificial Sequence
  Chemically Synthesized
QVQLQESGGGLVQAGGSLRLSCAASGFIFDTPDMGWYRQAPGKERELVAGINDGTNTNYADSVKGRFTISRDNAKNTVYLQMNSLKPEDTAVYYCAVDIGPAAYLYWGQGTQVTVSS

SEQ ID NO: 41708 - protein, 122 aa, Artificial Sequence
  Chemically Synthesized
QVQLQESGGGLVQAGGSLRLSCAASGNISGATVMGWYRQAPGKERELVAAISYGANTYYADSVKGRFTISRDNAKNTVYLQMNSLKPEDTAVYYCAALTVRYQKGAKQYVYWGQGTQVTVSS

SEQ ID NO: 41709 - protein, 118 aa, Artificial Sequence
  Chemically Synthesized
QVQLQESGGGLVQAGGSLRLSCAASGNISRSPKMGWYRQAPGKEREFVAGISRGTTTYYADSVKGRFTISRDNAKNTVYLQMNSLKPEDTAVYYCAVYQGAETGHFYWGQGTQVTVSS

SEQ ID NO: 41710 - protein, 119 aa, Artificial Sequence
  Chemically Synthesized
QVQLQESGGGLVQAGGSLRLSCAASGNISTPARMGWYRQAPGKEREFVAGIAGGATTYYADSVKGRFTISRDNAKNTVYLQMNSLKPEDTAVYYCAVPYRVYDRYHYYWGQGTQVTVSS

SEQ ID NO: 41711 - protein, 122 aa, Artificial Sequence
  Chemically Synthesized
QVQLQESGGGLVQAGGSLRLSCAASGYISSTASMGWYRQAPGKEREFVAGINRGGITYYADSVKGRFTISRDNAKNTVYLQMNSLKPEDTAVYYCAAVPAKQYAVDRSHLYWGQGTQVTVSS

SEQ ID NO: 41712 - protein, 122 aa, Artificial Sequence
  Chemically Synthesized
QVQLQESGGGLVQAGGSLRLSCAASGTISYNIKMGWYRQAPGKEREFVAGISTGTSTYYADSVKGRFTISRDNAKNTVYLQMNSLKPEDTAVYYCAAVVGRTISTRIEHRYWGQGTQVTVSS

SEQ ID NO: 41713 - protein, 122 aa, Artificial Sequence
  Chemically Synthesized
QVQLQESGGGLVQAGGSLRLSCAASGYISQYRKMGWYRQAPGKEREFVAGISVGTTTYYADSVKGRFTISRDNAKNTVYLQMNSLKPEDTAVYYCAVVDNPIERTYPFHYYWGQGTQVTVSS

SEQ ID NO: 41714 - protein, 118 aa, Artificial Sequence
  Chemically Synthesized
QVQLQESGGGLVQAGGSLRLSCAASGNIFGPYKMGWYRQAPGKEREFVAGIARGANTYYADSVKGRFTISRDNAKNTVYLQMNSLKPEDTAVYYCAVPRRGADRHFYWGQGTQVTVSS

SEQ ID NO: 41715 - protein, 118 aa, Artificial Sequence
  Chemically Synthesized
QVQLQESGGGLVQAGGSLRLSCAASGNIFVRYKMGWYRQAPGKEREFVAGISYGTSTYYADSVKGRFTISRDNAKNTVYLQMNSLKPEDTAVYYCAVVLYDGDSHWYWGQGTQVTVSS

SEQ ID NO: 41716 - protein, 122 aa, Artificial Sequence
  Chemically Synthesized
QVQLQESGGGLVQAGGSLRLSCAASGNISLTLSMGWYRQAPGKEREFVAGIATGGTTYYADSVKGRFTISRDNAKNTVYLQMNSLKPEDTAVYYCAVRSPYYTTDGGYLLYWGQGTQVTVSS

SEQ ID NO: 41717 - protein, 122 aa, Artificial Sequence
  Chemically Synthesized
QVQLQESGGGLVQAGGSLRLSCAASGNISDPTKMGWYRQAPGKEREFVAGISGGASTYYADSVKGRFTISRDNAKNTVYLQMNSLKPEDTAVYYCAVPGIYRGNRGWSHWYWGQGTQVTVSS

SEQ ID NO: 41718 - protein, 118 aa, Artificial Sequence
  Chemically Synthesized
QVQLQESGGGLVQAGGSLRLSCAASGTIFANARMGWYRQAPGKEREFVAGISRGTSTYYADSVKGRFTISRDNAKNTVYLQMNSLKPEDTAVYYCAAVPVHYAPHWYWGQGTQVTVSS

SEQ ID NO: 41719 - protein, 122 aa, Artificial Sequence
  Chemically Synthesized
QVQLQESGGGLVQAGGSLRLSCAASGSISTQDRMGWYRQAPGKEREFVAGIAKGANTYYADSVKGRFTISRDNAKNTVYLQMNSLKPEDTAVYYCAAPRRTYRSYDEYLYYWGQGTQVTVSS

SEQ ID NO: 41720 - protein, 118 aa, Artificial Sequence
  Chemically Synthesized
QVQLQESGGGLVQAGGSLRLSCAASGSISARPKMGWYRQAPGKEREFVAGIAAGATTYYADSVKGRFTISRDNAKNTVYLQMNSLKPEDTAVYYCAVVTFTTRRYVYWGQGTQVTVSS

SEQ ID NO: 41721 - protein, 122 aa, Artificial Sequence
  Chemically Synthesized
QVQLQESGGGLVQAGGSLRLSCAASGTISSVIRMGWYRQAPGKEREFVAGIAGGANTYYADSVKGRFTISRDNAKNTVYLQMNSLKPEDTAVYYCAVPSRYDGQYYRYYWYWGQGTQVTVSS

SEQ ID NO: 41722 - protein, 126 aa, Artificial Sequence
  Chemically Synthesized
QVQLQESGGGLVQAGGSLRLSCAASGTISKSLAMGWYRQAPGKEREFVAGIGTGSNTYYADSVKGRFTISRDNAKNTVYLQMNSLKPEDTAVYYCAAYYVYRVTTNRDRFVRHHYWGQGTQVTVSS

SEQ ID NO: 41723 - protein, 117 aa, Artificial Sequence
  Chemically Synthesized
QVQLQESGGGLVQAGGSLRLSCAASGYIFFIVSMGWYRQAPGKERELVAAIAAGTNTYADSVKGRFTISRDNAKNTVYLQMNSLKPEDTAVYYCAALYYNRGYHVYWGQGTQVTVSS

SEQ ID NO: 41724 - protein, 122 aa, Artificial Sequence
  Chemically Synthesized
QVQLQESGGGLVQAGGSLRLSCAASGSISLHYAMGWYRQAPGKERELVAGIGDGANTYYADSVKGRFTISRDNAKNTVYLQMNSLKPEDTAVYYCAVIFRVNWGDYGYLLYWGQGTQVTVSS

SEQ ID NO: 41725 - protein, 125 aa, Artificial Sequence
  Chemically Synthesized
QVQLQESGGGLVQAGGSLRLSCAASGYIFRYDDMGWYRQAPGKEREFVAAITAGANTNYADSVKGRFTISRDNAKNTVYLQMNSLKPEDTAVYYCAAEYLPYPYRVFRYDYHDYWGQGTQVTVSS

SEQ ID NO: 41726 - protein, 117 aa, Artificial Sequence
  Chemically Synthesized
QVQLQESGGGLVQAGGSLRLSCAASGTISPPYDAMGWYRQAPGKEREFVATIADGGSTNYADSVKGRFTISRDNAKNTVYLQMNSLKPEDTAVYYCAARDRDYLEYWGQGTQVTVSS

SEQ ID NO: 41727 - protein, 118 aa, Artificial Sequence
  Chemically Synthesized
QVQLQESGGGLVQAGGSLRLSCAASGSISSPPYMGWYRQAPGKEREFVATISYGGTTYYADSVKGRFTISRDNAKNTVYLQMNSLKPEDTAVYYCAVYYDIVGTHVYWGQGTQVTVSS

SEQ ID NO: 41728 - protein, 122 aa, Artificial Sequence
  Chemically Synthesized
QVQLQESGGGLVQAGGSLRLSCAASGTISGTNVMGWYRQAPGKERELVAGISDGASTYYADSVKGRFTISRDNAKNTVYLQMNSLKPEDTAVYYCAVVFATYYVGRYVHGYWGQGTQVTVSS

SEQ ID NO: 41729 - protein, 118 aa, Artificial Sequence
  Chemically Synthesized
QVQLQESGGGLVQAGGSLRLSCAASGNISRWWYMGWYRQAPGKERELVAGINYGGSTYYADSVKGRFTISRDNAKNTVYLQMNSLKPEDTAVYYCAVKRYYLIYHRYWGQGTQVTVSS

SEQ ID NO: 41730 - protein, 122 aa, Artificial Sequence
  Chemically Synthesized
QVQLQESGGGLVQAGGSLRLSCAASGNISYGFVMGWYRQAPGKEREFVAAITIGGTTNYADSVKGRFTISRDNAKNTVYLQMNSLKPEDTAVYYCAVILRVTRYYDGYLLYWGQGTQVTVSS

SEQ ID NO: 41731 - protein, 118 aa, Artificial Sequence
  Chemically Synthesized
QVQLQESGGGLVQAGGSLRLSCAASGNIFFIVRMGWYRQAPGKEREFVAAIGGGSTTYYADSVKGRFTISRDNAKNTVYLQMNSLKPEDTAVYYCAAVAWREAYYGYWGQGTQVTVSS

SEQ ID NO: 41732 - protein, 109 aa, Artificial Sequence
  Chemically Synthesized
QVQLQESGGGLVQAGGSLRLSCAASGTIFAGYMGWYRQAPGKEREFVAGINKGGTTYYADSVKGRFTISRDNAKNTVYLQMNSLKPEDTAVYYCAAMYWGQGTQVTVSS

SEQ ID NO: 41733 - protein, 126 aa, Artificial Sequence
  Chemically Synthesized
QVQLQESGGGLVQAGGSLRLSCAASGNIFYTKVMGWYRQAPGKEREFVAGIATGTITNYADSVKGRFTISRDNAKNTVYLQMNSLKPEDTAVYYCAVLVTVPRDYRYGWYQDHVYWGQGTQVTVSS

SEQ ID NO: 41734 - protein, 118 aa, Artificial Sequence
  Chemically Synthesized
QVQLQESGGGLVQAGGSLRLSCAASGNISDKSAMGWYRQAPGKERELVAAIGSGGITYYADSVKGRFTISRDNAKNTVYLQMNSLKPEDTAVYYCAAKYRHRGGHGYWGQGTQVTVSS

SEQ ID NO: 41735 - protein, 118 aa, Artificial Sequence
  Chemically Synthesized
QVQLQESGGGLVQAGGSLRLSCAASGTISTRGQMGWYRQAPGKEREFVASITQGGNTYYADSVKGRFTISRDNAKNTVYLQMNSLKPEDTAVYYCAVAPQSDYDLYYWGQGTQVTVSS

SEQ ID NO: 41736 - protein, 121 aa, Artificial Sequence
  Chemically Synthesized
QVQLQESGGGLVQAGGSLRLSCAASGYIFFIVSMGWYRQAPGKERELVAAIAAGTNTYADSVKGRFTISRDNAKNTVYLQMNSLKPEDTAVYYCAVIFRVNWGDYGYLLYWGQGTQVTVSS

SEQ ID NO: 41737 - protein, 126 aa, Artificial Sequence
  Chemically Synthesized
QVQLQESGGGLVQAGGSLRLSCAASGSIFRVISMGWYRQAPGKEREFVAAIDGGSSTNYADSVKGRFTISRDNAKNTVYLQMNSLKPEDTAVYYCAAISRDYADVYYTGYYLHRYWGQGTQVTVSS

SEQ ID NO: 41738 - protein, 122 aa, Artificial Sequence
  Chemically Synthesized
QVQLQESGGGLVQAGGSLRLSCAASGSISRGRGMGWYRQAPGKEREFVAAIGDGGTTNYADSVKGRFTISRDNAKNTVYLQMNSLKPEDTAVYYCAAHSDAGYIYLRGLWYWGQGTQVTVSS

SEQ ID NO: 41739 - protein, 122 aa, Artificial Sequence
  Chemically Synthesized
QVQLQESGGGLVQAGGSLRLSCAASGSIFTIVTMGWYRQAPGKEREFVASIAPGTITYYADSVKGRFTISRDNAKNTVYLQMNSLKPEDTAVYYCAAVRRDGDYVYGYHTYWGQGTQVTVSS

SEQ ID NO: 41740 - protein, 118 aa, Artificial Sequence
  Chemically Synthesized
QVQLQESGGGLVQAGGSLRLSCAASGSIFDIVWMGWYRQAPGKERELVAAIAGGGNTYYADSVKGRFTISRDNAKNTVYLQMNSLKPEDTAVYYCAAYFYRQFGYSYWGQGTQVTVSS

SEQ ID NO: 41741 - protein, 118 aa, Artificial Sequence
  Chemically Synthesized
QVQLQESGGGLVQAGGSLRLSCAASGSIFQTSYMGWYRQAPGKERELVASITRGAITNYADSVKGRFTISRDNAKNTVYLQMNSLKPEDTAVYYCAVQPTFFAGLAYWGQGTQVTVSS

SEQ ID NO: 41742 - protein, 118 aa, Artificial Sequence
  Chemically Synthesized
QVQLQESGGGLVQAGGSLRLSCAASGNIFSSGDMGWYRQAPGKERELVAAINPGGNTNYADSVKGRFTISRDNAKNTVYLQMNSLKPEDTAVYYCAVDAYDSDYLVYWGQGTQVTVSS

SEQ ID NO: 41743 - protein, 122 aa, Artificial Sequence
  Chemically Synthesized
QVQLQESGGGLVQAGGSLRLSCAASGYISRRGRMGWYRQAPGKEREFVAAITDGTTTYYADSVKGRFTISRDNAKNTVYLQMNSLKPEDTAVYYCAARYWYRYSSGYVHYYWGQGTQVTVSS

SEQ ID NO: 41744 - protein, 117 aa, Artificial Sequence
  Chemically Synthesized
QVQLQESGGGLVQAGGSLRLSCAASGSIFGPVTMGWYRQAPGKERELVASIAYGSSTNYADSVKGRFTISRDNAKNTVYLQMNSLKPEDTAVYYCAVLPTDGKTLYWGQGTQVTVSS

SEQ ID NO: 41745 - protein, 116 aa, Artificial Sequence
  Chemically Synthesized
QVQLQESGGGLVQAGGSLRLSCAASGFLTLVMGWYRQAPGKEREFVAGIATGSITNYADSVKGRFTISRDNAKNTVYLQMNSLKPEDTAVYYCAARYTDLTQLDYWGQGTQVTVSS

SEQ ID NO: 41746 - protein, 122 aa, Artificial Sequence
  Chemically Synthesized
QVQLQESGGGLVQAGGSLRLSCAASGNIFYQYGMGWYRQAPGKEREFVATIGKGTNTYYADSVKGRFTISRDNAKNTVYLQMNSLKPEDTAVYYCAAFWRYTGYTPGYYVYWGQGTQVTVSS

SEQ ID NO: 41747 - protein, 117 aa, Artificial Sequence
  Chemically Synthesized
QVQLQESGGGLVQAGGSLRLSCAASGYISPYYDMGWYRQAPGKEREFVAAMITVLLPYADSVKGRFTISRDNAKNTVYLQMNSLKPEDTAVYYCAADGYYTYTHIYWGQGTQVTVSS

SEQ ID NO: 41748 - protein, 122 aa, Artificial Sequence
  Chemically Synthesized
QVQLQESGGGLVQAGGSLRLSCAASGTISYDTYMGWYRQAPGKERELVATIGNGSSTYYADSVKGRFTISRDNAKNTVYLQMNSLKPEDTAVYYCAVQQVGLDSPYSWFVYWGQGTQVTVSS

SEQ ID NO: 41749 - protein, 122 aa, Artificial Sequence
  Chemically Synthesized
QVQLQESGGGLVQAGGSLRLSCAASGYIFGGSPMGWYRQAPGKERELVAAIGSGASTNYADSVKGRFTISRDNAKNTVYLQMNSLKPEDTAVYYCAVIYRYDFGPVGYLVYWGQGTQVTVSS

SEQ ID NO: 41750 - protein, 118 aa, Artificial Sequence
  Chemically Synthesized
QVQLQESGGGLVQAGGSLRLSCAASGTISPVRQMGWYRQAPGKEREFVASIASGSNTYYADSVKGRFTISRDNAKNTVYLQMNSLKPEDTAVYYCAAARWTRFRHDYWGQGTQVTVSS

SEQ ID NO: 41751 - protein, 121 aa, Artificial Sequence
  Chemically Synthesized
QVQLQESGGGLVQAGGSLRLSCAASGYISEWAYMGWYRQAPGKEREFVAGINRGGNTYYADSVKGRFTISRDNAKNTVYLQMNSLKPEDTAVYYCAAYPYDSYDKQDLDYWGQGTQVTVSS

SEQ ID NO: 41752 - protein, 122 aa, Artificial Sequence
  Chemically Synthesized
QVQLQESGGGLVQAGGSLRLSCAASGYIFAIRSMGWYRQAPGKEREFVAGIASGTITYYADSVKGRFTISRDNAKNTVYLQMNSLKPEDTAVYYCAAIATYQYGPSRAYWYWGQGTQVTVSS

SEQ ID NO: 41753 - protein, 117 aa, Artificial Sequence
  Chemically Synthesized
QVQLQESGGGLVQAGGSLRLSCAASGSIFNAEMGWYRQAPGKEREFVAGIADGSITNYADSVKGRFTISRDNAKNTVYLQMNSLKPEDTAVYYCAAVYGPDGTFPYWGQGTQVTVSS

SEQ ID NO: 41754 - protein, 122 aa, Artificial Sequence
  Chemically Synthesized
QVQLQESGGGLVQAGGSLRLSCAASGTIFYYAAMGWYRQAPGKERELVAAIGKGTITYYADSVKGRFTISRDNAKNTVYLQMNSLKPEDTAVYYCAAWVRRYGDNGGILEYWGQGTQVTVSS

SEQ ID NO: 41755 - protein, 118 aa, Artificial Sequence
  Chemically Synthesized
QVQLQESGGGLVQAGGSLRLSCAASGYIFDSYTMGWYRQAPGKEREFVATISYGGNTNYADSVKGRFTISRDNAKNTVYLQMNSLKPEDTAVYYCAVIKGTRYDHPYWGQGTQVTVSS

SEQ ID NO: 41756 - protein, 122 aa, Artificial Sequence
  Chemically Synthesized
QVQLQESGGGLVQAGGSLRLSCAASGYIFFIVSMGWYRQAPGKERELVAGIGDGANTYYADSVKGRFTISRDNAKNTVYLQMNSLKPEDTAVYYCAVIFRVNWGDYGYLLYWGQGTQVTVSS

SEQ ID NO: 41757 - protein, 124 aa, Artificial Sequence
  Chemically Synthesized
QVQLQESGGGLVQAGGSLRLSCAASGYISTLDLMGWYRQAPGKEREFVAGIAFGGTTYYADSVKGRFTISRDNAKNTVYLQMNSLKPEDTAVYYCAAYYFYPSYDHDQDDFDYWGQGTQVTVSS

SEQ ID NO: 41758 - protein, 118 aa, Artificial Sequence
  Chemically Synthesized
QVQLQESGGGLVQAGGSLRLSCAASGYISHFAPMGWYRQAPGKEREFVAGITRGSSTYYADSVKGRFTISRDNAKNTVYLQMNSLKPEDTAVYYCAVISHYYRGHTYWGQGTQVTVSS

SEQ ID NO: 41759 - protein, 118 aa, Artificial Sequence
  Chemically Synthesized
QVQLQESGGGLVQAGGSLRLSCAASGSISRRIEMGWYRQAPGKERELVAAITLGTSTNYADSVKGRFTISRDNAKNTVYLQMNSLKPEDTAVYYCAVDGDDNGTLPYWGQGTQVTVSS

SEQ ID NO: 41760 - protein, 122 aa, Artificial Sequence
  Chemically Synthesized
QVQLQESGGGLVQAGGSLRLSCAASGNISYYYYMGWYRQAPGKEREFVASIGEGTSTNYADSVKGRFTISRDNAKNTVYLQMNSLKPEDTAVYYCAAIYAYPDDNGSYHGYWGQGTQVTVSS

SEQ ID NO: 41761 - protein, 125 aa, Artificial Sequence
  Chemically Synthesized
QVQLQESGGGLVQAGGSLRLSCAASGSIFPRALMGWYRQAPGKERELVAAIGDGGTTYYADSVKGRFTISRDNAKNTVYLQMNSLKPEDTAVYYCAAARRVYASPWRPLGYLVYWGQGTQVTVSS

SEQ ID NO: 41762 - protein, 121 aa, Artificial Sequence
  Chemically Synthesized
QVQLQESGGGLVQAGGSLRLSCAASGNFLLRSMGWYRQAPGKERELVATIADGGTTNYADSVKGRFTISRDNAKNTVYLQMNSLKPEDTAVYYCAATTPIDEITPDDFDYWGQGTQVTVSS

SEQ ID NO: 41763 - protein, 118 aa, Artificial Sequence
  Chemically Synthesized
QVQLQESGGGLVQAGGSLRLSCAASGNISYYLAMGWYRQAPGKERELVAGIDEGATTYYADSVKGRFTISRDNAKNTVYLQMNSLKPEDTAVYYCAVYVTYLDDFYYWGQGTQVTVSS

SEQ ID NO: 41764 - protein, 117 aa, Artificial Sequence
  Chemically Synthesized
QVQLQESGGGLVQAGGSLRLSCAASGSIFPIRDMGWYRQAPGKERELVASIGGGSNTYYADSVKGRFTISRDNAKNTVYLQMNSLKPEDTAVYYCAVTETQHYHKYWGQGTQVTVSS

SEQ ID NO: 41765 - protein, 118 aa, Artificial Sequence
  Chemically Synthesized
QVQLQESGGGLVQAGGSLRLSCAASGNISVQWDMGWYRQAPGKEREFVAAISAGTTTYYADSVKGRFTISRDNAKNTVYLQMNSLKPEDTAVYYCAADYFDGWYHYYWGQGTQVTVSS

SEQ ID NO: 41766 - protein, 118 aa, Artificial Sequence
  Chemically Synthesized
QVQLQESGGGLVQAGGSLRLSCAASGSIFRAHIMGWYRQAPGKEREFVAAINEGGITNYADSVKGRFTISRDNAKNTVYLQMNSLKPEDTAVYYCAVAAWTYTDYGYWGQGTQVTVSS

SEQ ID NO: 41767 - protein, 118 aa, Artificial Sequence
  Chemically Synthesized
QVQLQESGGGLVQAGGSLRLSCAASGNIFDRYAMGWYRQAPGKERELVAAIGNGGSTYYADSVKGRFTISRDNAKNTVYLQMNSLKPEDTAVYYCAVFLARYQVHPYWGQGTQVTVSS

SEQ ID NO: 41768 - protein, 118 aa, Artificial Sequence
  Chemically Synthesized
QVQLQESGGGLVQAGGSLRLSCAASGTIFPPYAMGWYRQAPGKERELVAGINDGAITYYADSVKGRFTISRDNAKNTVYLQMNSLKPEDTAVYYCAVLHEPTDRFYYWGQGTQVTVSS

SEQ ID NO: 41769 - protein, 125 aa, Artificial Sequence
  Chemically Synthesized
QVQLQESGGGLVQAGGSLRLSCAASGSISDSGAMGWYRQAPGKERELVAGIARGSSTNYADSVKGRFTISRDNAKNTVYLQMNSLKPEDTAVYYCAAYYDHETRDRSSYVRLWYWGQGTQVTVSS

SEQ ID NO: 41770 - protein, 118 aa, Artificial Sequence
  Chemically Synthesized
QVQLQESGGGLVQAGGSLRLSCAASGNISPPQVMGWYRQAPGKERELVAAIGRGGNTYYADSVKGRFTISRDNAKNTVYLQMNSLKPEDTAVYYCAASGPITPLHDYWGQGTQVTVSS

SEQ ID NO: 41771 - protein, 121 aa, Artificial Sequence
  Chemically Synthesized
QVQLQESGGGLVQAGGSLRLSCAASGSISDNEYMGWYRQAPGKERELVATIDQGATTNYADSVKGRFTISRDNAKNTVYLQMNSLKPEDTAVYYCAATMFILLCCIGCIYWGQGTQVTVSS

SEQ ID NO: 41772 - protein, 122 aa, Artificial Sequence
  Chemically Synthesized
QVQLQESGGGLVQAGGSLRLSCAASGNISAPYIMGWYRQAPGKERELVAAIATGTTTYYADSVKGRFTISRDNAKNTVYLQMNSLKPEDTAVYYCAALYSFVGELYGPFVYWGQGTQVTVSS

SEQ ID NO: 41773 - protein, 116 aa, Artificial Sequence
  Chemically Synthesized
QVQLQESGGGLVQAGGSLRLSCAASGTISDGYVMGWYRQAPGKERELVAAITYGASTYYADSVKGRFTISRDNAKNTVYLQMNSLKPEDTAVYYCAVAQSAWHGYWGQGTQVTVSS

SEQ ID NO: 41774 - protein, 119 aa, Artificial Sequence
  Chemically Synthesized
QVQLQESGGGLVQAGGSLRLSCAASGTISPGAAMGWYRQAPGKERELVAGIAVGGTTYYADSVKGRFTISRDNAKNTVYLQMNSLKPEDTAVYYCAGYVYQYLRRYWYWGQGTQVTVSS

SEQ ID NO: 41775 - protein, 110 aa, Artificial Sequence
  Chemically Synthesized
QVQLQESGGGLVQAGGSLRLSCAASGSIFGETSMGWYRQAPGKERELVASITDRCYYQYADSVKGRFTISRDNAKNTVYLQMNSLKPEDTAVYYCAVDYWGQGTQVTVSS

SEQ ID NO: 41776 - protein, 113 aa, Artificial Sequence
  Chemically Synthesized
QVQLQESGGGLVQAGGSLRLSCAASGTIFGYTYMGWYRQAPGKEREFVATISEGTITYYADSVKGRFTISRDNAKNTVYLQMNSLKPEDTAVYYCAATVRMYWGQGTQVTVSS

SEQ ID NO: 41777 - protein, 118 aa, Artificial Sequence
  Chemically Synthesized
QVQLQESGGGLVQAGGSLRLSCAASGTISTDSQMGWYRQAPGKERELVAGIADGGITYYADSVKGRFTISRDNAKNTVYLQMNSLKPEDTAVYYCAVWYLARIYYKYWGQGTQVTVSS

SEQ ID NO: 41778 - protein, 126 aa, Artificial Sequence
  Chemically Synthesized
QVQLQESGGGLVQAGGSLRLSCAASGTIFTYYYMGWYRQAPGKEREFVAGIGWGTTTYYADSVKGRFTISRDNAKNTVYLQMNSLKPEDTAVYYCAVDLLKYIGYLRDGPTEHRYWGQGTQVTVSS

SEQ ID NO: 41779 - protein, 118 aa, Artificial Sequence
  Chemically Synthesized
QVQLQESGGGLVQAGGSLRLSCAASGTIFDRLDMGWYRQAPGKEREFVAGINDGGNTYYADSVKGRFTISRDNAKNTVYLQMNSLKPEDTAVYYCAAGDERPAEHYYWGQGTQVTVSS

SEQ ID NO: 41780 - protein, 118 aa, Artificial Sequence
  Chemically Synthesized
QVQLQESGGGLVQAGGSLRLSCAASGTIFIGLWMGWYRQAPGKERELVAAINGGAITYYADSVKGRFTISRDNAKNTVYLQMNSLKPEDTAVYYCAAIRLYPVGHNYWGQGTQVTVSS

SEQ ID NO: 41781 - protein, 122 aa, Artificial Sequence
  Chemically Synthesized
QVQLQESGGGLVQAGGSLRLSCAASGTIFDTPAMGWYRQAPGKEREFVAAISPGTTTNYADSVKGRFTISRDNAKNTVYLQMNSLKPEDTAVYYCAVATDGNIAGPGRFYYWGQGTQVTVSS

SEQ ID NO: 41782 - protein, 121 aa, Artificial Sequence
  Chemically Synthesized
QVQLQESGGGLVQAGGSLRLSCAASGTIFGDDSMGWYRQAPGKERELVAGIAYGTTTNYADSVKGRFTISRDNAKNTVYLQMNSLKPEDTAVYYCAVRDNDLTSGLGTFYWGQGTQVTVSS

SEQ ID NO: 41783 - protein, 121 aa, Artificial Sequence
  Chemically Synthesized
QVQLQESGGGLVQAGGSLRLSCAASGSISYTDVMGWYRQAPGKEREFVAVLILVVVPYADSVKGRFTISRDNAKNTVYLQMNSLKPEDTAVYYCAAYDDISTTLTSLVMYWGQGTQVTVSS

SEQ ID NO: 41784 - protein, 118 aa, Artificial Sequence
  Chemically Synthesized
QVQLQESGGGLVQAGGSLRLSCAASGSISHSFGMGWYRQAPGKERELVAAITNGASTYYADSVKGRFTISRDNAKNTVYLQMNSLKPEDTAVYYCAAYFYDQGWYRYWGQGTQVTVSS

SEQ ID NO: 41785 - protein, 118 aa, Artificial Sequence
  Chemically Synthesized
QVQLQESGGGLVQAGGSLRLSCAASGSISGYGIMGWYRQAPGKEREFVASIAAGGTTNYADSVKGRFTISRDNAKNTVYLQMNSLKPEDTAVYYCAARKRHWFAHVYWGQGTQVTVSS

SEQ ID NO: 41786 - protein, 122 aa, Artificial Sequence
  Chemically Synthesized
QVQLQESGGGLVQAGGSLRLSCAASGYISTRGDMGWYRQAPGKEREFVAAIDYGGITNYADSVKGRFTISRDNAKNTVYLQMNSLKPEDTAVYYCAVDAQYTFRRPEAYAYWGQGTQVTVSS

SEQ ID NO: 41787 - protein, 118 aa, Artificial Sequence
  Chemically Synthesized
QVQLQESGGGLVQAGGSLRLSCAASGTIFYLEQMGWYRQAPGKEREFVAAINTGTTTNYADSVKGRFTISRDNAKNTVYLQMNSLKPEDTAVYYCAVDFHIDRYYDYWGQGTQVTVSS

SEQ ID NO: 41788 - protein, 126 aa, Artificial Sequence
  Chemically Synthesized
QVQLQESGGGLVQAGGSLRLSCAASGSIFAGNNMGWYRQAPGKERELVAAISSGASTNYADSVKGRFTISRDNAKNTVYLQMNSLKPEDTAVYYCAVRGVGWWARYDDTYDRHTYWGQGTQVTVSS

SEQ ID NO: 41789 - protein, 120 aa, Artificial Sequence
  Chemically Synthesized
QVQLQESGGGLVQAGGSLRLSCAASGNISSGYAMGWYRQAPGKERELVATILMVLVPYADSVKGRFTISRDNAKNTVYLQMNSLKPEDTAVYYCAADYGQFVADPSTLYWGQGTQVTVSS

SEQ ID NO: 41790 - protein, 118 aa, Artificial Sequence
  Chemically Synthesized
QVQLQESGGGLVQAGGSLRLSCAASGNISRGIVMGWYRQAPGKEREFVASIGEGGNTYYADSVKGRFTISRDNAKNTVYLQMNSLKPEDTAVYYCAALWRYWQDYLYWGQGTQVTVSS

SEQ ID NO: 41791 - protein, 118 aa, Artificial Sequence
  Chemically Synthesized
QVQLQESGGGLVQAGGSLRLSCAASGYISRYLSMGWYRQAPGKERELVAAIALGSNTYYADSVKGRFTISRDNAKNTVYLQMNSLKPEDTAVYYCAVRPLRRYGHYYWGQGTQVTVSS

SEQ ID NO: 41792 - protein, 117 aa, Artificial Sequence
  Chemically Synthesized
QVQLQESGGGLVQAGGSLRLSCAASGYIFYYGGMGWYRQAPGKERELVATINRGATTNYADSVKGRFTISRDNAKNTVYLQMNSLKPEDTAVYYCAAQTWTTLTFYWGQGTQVTVSS

SEQ ID NO: 41793 - protein, 121 aa, Artificial Sequence
  Chemically Synthesized
QVQLQESGGGLVQAGGSLRLSCAASGTISGGWYMGWYRQAPGKEREFVAGIADGSITYYADSVKGRFTISRDNAKNTVYLQMNSLKPEDTAVYYCAAQYIGEQSSTVTMYWGQGTQVTVSS

SEQ ID NO: 41794 - protein, 118 aa, Artificial Sequence
  Chemically Synthesized
QVQLQESGGGLVQAGGSLRLSCAASGTIFEYAYMGWYRQAPGKERELVAAIGVGTSTYYADSVKGRFTISRDNAKNTVYLQMNSLKPEDTAVYYCAAEGVQDRDHGYWGQGTQVTVSS

SEQ ID NO: 41795 - protein, 122 aa, Artificial Sequence
  Chemically Synthesized
QVQLQESGGGLVQAGGSLRLSCAASGSIFYDGGMGWYRQAPGKERELVAGITSGATTNYADSVKGRFTISRDNAKNTVYLQMNSLKPEDTAVYYCAAPQIVPSYATAYHRYWGQGTQVTVSS

SEQ ID NO: 41796 - protein, 118 aa, Artificial Sequence
  Chemically Synthesized
QVQLQESGGGLVQAGGSLRLSCAASGSIFWPDDMGWYRQAPGKERELVATITYGANTNYADSVKGRFTISRDNAKNTVYLQMNSLKPEDTAVYYCAAHSTHNTHFGYWGQGTQVTVSS

SEQ ID NO: 41797 - protein, 118 aa, Artificial Sequence
  Chemically Synthesized
QVQLQESGGGLVQAGGSLRLSCAASGSISYSTYMGWYRQAPGKERELVAAITRGTTTNYADSVKGRFTISRDNAKNTVYLQMNSLKPEDTAVYYCAVGPRYDVQYYYWGQGTQVTVSS

SEQ ID NO: 41798 - protein, 118 aa, Artificial Sequence
  Chemically Synthesized
QVQLQESGGGLVQAGGSLRLSCAASGTIFDFDGMGWYRQAPGKERELVAGIDFGTSTYYADSVKGRFTISRDNAKNTVYLQMNSLKPEDTAVYYCAADFIRAFEHYYWGQGTQVTVSS

SEQ ID NO: 41799 - protein, 122 aa, Artificial Sequence
  Chemically Synthesized
QVQLQESGGGLVQAGGSLRLSCAASGSISGYYYMGWYRQAPGKEREFVAAISGGGTTYYADSVKGRFTISRDNAKNTVYLQMNSLKPEDTAVYYCAVPFYSPYYDYASHTYWGQGTQVTVSS

SEQ ID NO: 41800 - protein, 126 aa, Artificial Sequence
  Chemically Synthesized
QVQLQESGGGLVQAGGSLRLSCAASGNIFPYISMGWYRQAPGKERELVAGIDYGGITNYADSVKGRFTISRDNAKNTVYLQMNSLKPEDTAVYYCAALLFFPTVVVIYRRDVYRYWGQGTQVTVSS

SEQ ID NO: 41801 - protein, 118 aa, Artificial Sequence
  Chemically Synthesized
QVQLQESGGGLVQAGGSLRLSCAASGNISAGAYMGWYRQAPGKERELVAAITLGSNTNYADSVKGRFTISRDNAKNTVYLQMNSLKPEDTAVYYCAVITRTRVNHAYWGQGTQVTVSS

SEQ ID NO: 41802 - protein, 118 aa, Artificial Sequence
  Chemically Synthesized
QVQLQESGGGLVQAGGSLRLSCAASGNGTMGWYRQAPGKERELVAAIAYGSITNYADSVKGRFTISRDNAKNTVYLQMNSLKPEDTAVYYCAAEDRDYGPYYYPYGYWGQGTQVTVSS

SEQ ID NO: 41803 - protein, 118 aa, Artificial Sequence
  Chemically Synthesized
QVQLQESGGGLVQAGGSLRLSCAASGSISAYVVMGWYRQAPGKERELVAGINPGSSTNYADSVKGRFTISRDNAKNTVYLQMNSLKPEDTAVYYCAVPGLLYYYHDYWGQGTQVTVSS

SEQ ID NO: 41804 - protein, 118 aa, Artificial Sequence
  Chemically Synthesized
QVQLQESGGGLVQAGGSLRLSCAASGTIFRTQFMGWYRQAPGKERELVASISRGGSTYYADSVKGRFTISRDNAKNTVYLQMNSLKPEDTAVYYCAARKPWYRTHYYWGQGTQVTVSS

SEQ ID NO: 41805 - protein, 122 aa, Artificial Sequence
  Chemically Synthesized
QVQLQESGGGLVQAGGSLRLSCAASGTISRYVGMGWYRQAPGKERELVAAIGPGTITNYADSVKGRFTISRDNAKNTVYLQMNSLKPEDTAVYYCAAWVGGLETGLRHLDYWGQGTQVTVSS

SEQ ID NO: 41806 - protein, 125 aa, Artificial Sequence
  Chemically Synthesized
QVQLQESGGGLVQAGGSLRLSCAASGTISRYAYMGWYRQAPGKERELVASINRGTITNYADSVKGRFTISRDNAKNTVYLQMNSLKPEDTAVYYCAVRTPLAPSPRWRRTPFIYWGQGTQVTVSS

SEQ ID NO: 41807 - protein, 121 aa, Artificial Sequence
  Chemically Synthesized
QVQLQESGGGLVQAGGSLRLSCAASGSISSTVMGWYRQAPGKEREFVAGINAGGNTYYADSVKGRFTISRDNAKNTVYLQMNSLKPEDTAVYYCAADPDYSYSDDVLFLYWGQGTQVTVSS

SEQ ID NO: 41808 - protein, 118 aa, Artificial Sequence
  Chemically Synthesized
QVQLQESGGGLVQAGGSLRLSCAASGSIFRQIGMGWYRQAPGKEREFVAGIGRGGNTYYADSVKGRFTISRDNAKNTVYLQMNSLKPEDTAVYYCAAAYVTSPGYAYWGQGTQVTVSS

SEQ ID NO: 41809 - protein, 126 aa, Artificial Sequence
  Chemically Synthesized
QVQLQESGGGLVQAGGSLRLSCAASGNISFYWLMGWYRQAPGKERELVAAINHGGSTNYADSVKGRFTISRDNAKNTVYLQMNSLKPEDTAVYYCAAHRHQRWYPFYSYLTRFFYWGQGTQVTVSS

SEQ ID NO: 41810 - protein, 108 aa, Artificial Sequence
  Chemically Synthesized
QVQLQESGGGLVQAGGSLRLSCAASGTIFGYDEMGWYRQAPGKEREFVATIDGGITNYADSVKGRFTISRDNAKNTVYLQMNSLKPEDTAVYYCANYWGQGTQVTVSS

SEQ ID NO: 41811 - protein, 121 aa, Artificial Sequence
  Chemically Synthesized
QVQLQESGGGLVQAGGSLRLSCAASGTIFYLGGMGWYRQAPGKEREFVAAISGGATTYYADSVKGRFTISRDNAKNTVYLQMNSLKPEDTAVYYCAARQRYANPSYFLYYWGQGTQVTVSS

SEQ ID NO: 41812 - protein, 125 aa, Artificial Sequence
  Chemically Synthesized
QVQLQESGGGLVQAGGSLRLSCAASGNISYYEVMGWYRQAPGKERELVAGIDYGGNTYYADSVKGRFTISRDNAKNTVYLQMNSLKPEDTAVYYCAVVAYESGTARYPRAGFSYWGQGTQVTVSS

SEQ ID NO: 41813 - protein, 126 aa, Artificial Sequence
  Chemically Synthesized
QVQLQESGGGLVQAGGSLRLSCAASGTIFDAFFMGWYRQAPGKERELVATIGGGTTTNYADSVKGRFTISRDNAKNTVYLQMNSLKPEDTAVYYCAVRFIDYHLYDSDANPEFYYWGQGTQVTVSS

SEQ ID NO: 41814 - protein, 122 aa, Artificial Sequence
  Chemically Synthesized
QVQLQESGGGLVQAGGSLRLSCAASGYISKYGSMGWYRQAPGKEREFVASIGLGGNTNYADSVKGRFTISRDNAKNTVYLQMNSLKPEDTAVYYCAVTYVDRYVTSIVHYYWGQGTQVTVSS

SEQ ID NO: 41815 - protein, 126 aa, Artificial Sequence
  Chemically Synthesized
QVQLQESGGGLVQAGGSLRLSCAASGTIFSTSLMGWYRQAPGKERELVASIGIGGSTNYADSVKGRFTISRDNAKNTVYLQMNSLKPEDTAVYYCAVEYTYYDYDSYDPEPWFDYWGQGTQVTVSS

SEQ ID NO: 41816 - protein, 122 aa, Artificial Sequence
  Chemically Synthesized
QVQLQESGGGLVQAGGSLRLSCAASGYIFGQQPMGWYRQAPGKEREFVASITDGATTNYADSVKGRFTISRDNAKNTVYLQMNSLKPEDTAVYYCAVRSTPGHFTDYGYPYWGQGTQVTVSS

SEQ ID NO: 41817 - protein, 126 aa, Artificial Sequence
  Chemically Synthesized
QVQLQESGGGLVQAGGSLRLSCAASGTIFDGYVMGWYRQAPGKERELVATIGWGATTNYADSVKGRFTISRDNAKNTVYLQMNSLKPEDTAVYYCAVPPLAYRRQYDFFLPTYYYWGQGTQVTVSS

SEQ ID NO: 41818 - protein, 118 aa, Artificial Sequence
  Chemically Synthesized
QVQLQESGGGLVQAGGSLRLSCAASGTIFDHAPMGWYRQAPGKEREFVAGIDYGGSTYYADSVKGRFTISRDNAKNTVYLQMNSLKPEDTAVYYCAAYDQGTIGLPYWGQGTQVTVSS

SEQ ID NO: 41819 - protein, 121 aa, Artificial Sequence
  Chemically Synthesized
QVQLQESGGGLVQAGGSLRLSCAASGNISAGTYMGWYRQAPGKERELVAAINLGTTTYADSVKGRFTISRDNAKNTVYLQMNSLKPEDTAVYYCAVTGGYYYDGYQSHTYWGQGTQVTVSS

SEQ ID NO: 41820 - protein, 122 aa, Artificial Sequence
  Chemically Synthesized
QVQLQESGGGLVQAGGSLRLSCAASGTISDITAMGWYRQAPGKERELVAGIAFGGITYYADSVKGRFTISRDNAKNTVYLQMNSLKPEDTAVYYCAVAWWFLYRDANLHAYWGQGTQVTVSS

SEQ ID NO: 41821 - protein, 118 aa, Artificial Sequence
  Chemically Synthesized
QVQLQESGGGLVQAGGSLRLSCAASGSISRYDGMGWYRQAPGKERELVAGIGVGGNTYYADSVKGRFTISRDNAKNTVYLQMNSLKPEDTAVYYCAAYRATRRRLAYWGQGTQVTVSS

SEQ ID NO: 41822 - protein, 118 aa, Artificial Sequence
  Chemically Synthesized
QVQLQESGGGLVQAGGSLRLSCAASGNIFVGHEMGWYRQAPGKERELVATIDSGGTTYYADSVKGRFTISRDNAKNTVYLQMNSLKPEDTAVYYCAVQSPVKTDYYYWGQGTQVTVSS

SEQ ID NO: 41823 - protein, 122 aa, Artificial Sequence
  Chemically Synthesized
QVQLQESGGGLVQAGGSLRLSCAASGYIFRSYYMGWYRQAPGKEREFVAAIDRGAITYYADSVKGRFTISRDNAKNTVYLQMNSLKPEDTAVYYCAAWRYVARYDIAYHYYWGQGTQVTVSS

SEQ ID NO: 41824 - protein, 121 aa, Artificial Sequence
  Chemically Synthesized
QVQLQESGGGLVQAGGSLRLSCAASGSISWSEMGWYRQAPGKEREFVASIAVGTTTYYADSVKGRFTISRDNAKNTVYLQMNSLKPEDTAVYYCAVRDYTYSDYFIQLYYWGQGTQVTVSS

SEQ ID NO: 41825 - protein, 118 aa, Artificial Sequence
  Chemically Synthesized
QVQLQESGGGLVQAGGSLRLSCAASGYIFYQYKMGWYRQAPGKERELVAAIARGSTTYYADSVKGRFTISRDNAKNTVYLQMNSLKPEDTAVYYCAAVYRSHKYFTYWGQGTQVTVSS

SEQ ID NO: 41826 - protein, 126 aa, Artificial Sequence
  Chemically Synthesized
QVQLQESGGGLVQAGGSLRLSCAASGYISNLGDMGWYRQAPGKEREFVAGINYGSSTNYADSVKGRFTISRDNAKNTVYLQMNSLKPEDTAVYYCAAGDGGDVQYNDPTTGLHDYWGQGTQVTVSS

SEQ ID NO: 41827 - protein, 122 aa, Artificial Sequence
  Chemically Synthesized
QVQLQESGGGLVQAGGSLRLSCAASGSISVWYTMGWYRQAPGKERELVATIDGGATTNYADSVKGRFTISRDNAKNTVYLQMNSLKPEDTAVYYCAASYVRHDTTRNRHSYWGQGTQVTVSS

SEQ ID NO: 41828 - protein, 117 aa, Artificial Sequence
  Chemically Synthesized
QVQLQESGGGLVQAGGSLRLSCAASGTIFFDYDMGWYRQAPGKEREFVAAIDNGATTYADSVKGRFTISRDNAKNTVYLQMNSLKPEDTAVYYCAAATTAQASHDYWGQGTQVTVSS

SEQ ID NO: 41829 - protein, 118 aa, Artificial Sequence
  Chemically Synthesized
QVQLQESGGGLVQAGGSLRLSCAASGNIFYLQLMGWYRQAPGKEREFVAGIGAGGSTYYADSVKGRFTISRDNAKNTVYLQMNSLKPEDTAVYYCAAYYSERPYFTYWGQGTQVTVSS

SEQ ID NO: 41830 - protein, 118 aa, Artificial Sequence
  Chemically Synthesized
QVQLQESGGGLVQAGGSLRLSCAASGYISGIAGMGWYRQAPGKEREFVAAINSGSITYYADSVKGRFTISRDNAKNTVYLQMNSLKPEDTAVYYCAARVWDNYYHYYWGQGTQVTVSS

SEQ ID NO: 41831 - protein, 122 aa, Artificial Sequence
  Chemically Synthesized
QVQLQESGGGLVQAGGSLRLSCAASGYISPDDWMGWYRQAPGKERELVATISYGTSTYYADSVKGRFTISRDNAKNTVYLQMNSLKPEDTAVYYCAVDATYALYPTDDHTYWGQGTQVTVSS

SEQ ID NO: 41832 - protein, 121 aa, Artificial Sequence
  Chemically Synthesized
QVQLQESGGGLVQAGGSLRLSCAASGSISLSYQMGWYRQAPGKEREFVATITSVVIPYADSVKGRFTISRDNAKNTVYLQMNSLKPEDTAVYYCAALLTDQWSDDLSHDYWGQGTQVTVSS

SEQ ID NO: 41833 - protein, 118 aa, Artificial Sequence
  Chemically Synthesized
QVQLQESGGGLVQAGGSLRLSCAASGNIFATSYMGWYRQAPGKEREFVASIALGAITYYADSVKGRFTISRDNAKNTVYLQMNSLKPEDTAVYYCAVGYDIIGLLVYWGQGTQVTVSS

SEQ ID NO: 41834 - protein, 117 aa, Artificial Sequence
  Chemically Synthesized
QVQLQESGGGLVQAGGSLRLSCAASGTISYLYMGWYRQAPGKEREFVAGINAGGTTNYADSVKGRFTISRDNAKNTVYLQMNSLKPEDTAVYYCAAFAYYQDYYQYWGQGTQVTVSS

SEQ ID NO: 41835 - protein, 118 aa, Artificial Sequence
  Chemically Synthesized
QVQLQESGGGLVQAGGSLRLSCAASGTIFDLAVMGWYRQAPGKEREFVASINPGASTYYADSVKGRFTISRDNAKNTVYLQMNSLKPEDTAVYYCAAAGWSYPGLGYWGQGTQVTVSS

SEQ ID NO: 41836 - protein, 118 aa, Artificial Sequence
  Chemically Synthesized
QVQLQESGGGLVQAGGSLRLSCAASGSIFLRRTMGWYRQAPGKERELVATITAGGNTYYADSVKGRFTISRDNAKNTVYLQMNSLKPEDTAVYYCAVGLWYKYWYFYWGQGTQVTVSS

SEQ ID NO: 41837 - protein, 117 aa, Artificial Sequence
  Chemically Synthesized
QVQLQESGGGLVQAGGSLRLSCAASGNISSTTMGWYRQAPGKERELVAAIATGGNTYYADSVKGRFTISRDNAKNTVYLQMNSLKPEDTAVYYCAADGADDETLPYWGQGTQVTVSS

SEQ ID NO: 41838 - protein, 118 aa, Artificial Sequence
  Chemically Synthesized
QVQLQESGGGLVQAGGSLRLSCAASGYISSTGAMGWYRQAPGKERELVATIDYGGSTNYADSVKGRFTISRDNAKNTVYLQMNSLKPEDTAVYYCAVSTYGQGYFNYWGQGTQVTVSS

SEQ ID NO: 41839 - protein, 117 aa, Artificial Sequence
  Chemically Synthesized
QVQLQESGGGLVQAGGSLRLSCAASGTIFANYQMGWYRQAPGKERELVASIDGGSTTYYADSVKGRFTISRDNAKNTVYLQMNSLKPEDTAVYYCAVRGYPDGPIYWGQGTQVTVSS

SEQ ID NO: 41840 - protein, 126 aa, Artificial Sequence
  Chemically Synthesized
QVQLQESGGGLVQAGGSLRLSCAASGTIFPYNVMGWYRQAPGKEREFVAAITRGGTTYYADSVKGRFTISRDNAKNTVYLQMNSLKPEDTAVYYCAARYARTWLERITGGRGYLYWGQGTQVTVSS

SEQ ID NO: 41841 - protein, 121 aa, Artificial Sequence
  Chemically Synthesized
QVQLQESGGGLVQAGGSLRLSCAASGTIFSLAYMGWYRQAPGKEREFVAGIGQGCYYQYADSVKGRFTISRDNAKNTVYLQMNSLKPEDTAVYYCAAYYAEYGNFADHLYWGQGTQVTVSS

SEQ ID NO: 41842 - protein, 115 aa, Artificial Sequence
  Chemically Synthesized
QVQLQESGGGLVQAGGSLRLSCAASGNISFPRYMGWYRQAPGKEREFVASISDGTNTYYADSVKGRFTISRDNAKNTVYLQMNSLKPEDTAVYYCAVTGYYLAYWGQGTQVTVSS

SEQ ID NO: 41843 - protein, 118 aa, Artificial Sequence
  Chemically Synthesized
QVQLQESGGGLVQAGGSLRLSCAASGNISTYYLMGWYRQAPGKEREFVAAISFGGSTYYADSVKGRFTISRDNAKNTVYLQMNSLKPEDTAVYYCAVDFGWGVPLYYWGQGTQVTVSS

SEQ ID NO: 41844 - protein, 118 aa, Artificial Sequence
  Chemically Synthesized
QVQLQESGGGLVQAGGSLRLSCAASGNIFEDSVMGWYRQAPGKEREFVASIDTGGTTYYADSVKGRFTISRDNAKNTVYLQMNSLKPEDTAVYYCAVAHYGYDYYGYWGQGTQVTVSS

SEQ ID NO: 41845 - protein, 122 aa, Artificial Sequence
  Chemically Synthesized
QVQLQESGGGLVQAGGSLRLSCAASGNISHFRIMGWYRQAPGKERELVAAISWGGTTYYADSVKGRFTISRDNAKNTVYLQMNSLKPEDTAVYYCAVQEWRGHYDTDRYPYWGQGTQVTVSS

SEQ ID NO: 41846 - protein, 118 aa, Artificial Sequence
  Chemically Synthesized
QVQLQESGGGLVQAGGSLRLSCAASGTISVNDAMGWYRQAPGKERELVAAINYGTITYYADSVKGRFTISRDNAKNTVYLQMNSLKPEDTAVYYCAAWYWGRYLHDYWGQGTQVTVSS

SEQ ID NO: 41847 - protein, 118 aa, Artificial Sequence
  Chemically Synthesized
QVQLQESGGGLVQAGGSLRLSCAASGNISDRATMGWYRQAPGKERELVAGIASGASTYYADSVKGRFTISRDNAKNTVYLQMNSLKPEDTAVYYCAAWGDGLRLHSYWGQGTQVTVSS

SEQ ID NO: 41848 - protein, 112 aa, Artificial Sequence
  Chemically Synthesized
QVQLQESGGGLVQAGGSLRLSCAASGNIDTPMGWYRQAPGKEREFVAAINSGGTTNYADSVKGRFTISRDNAKNTVYLQMNSLKPEDTAVYYCAAIGEYDYWGQGTQVTVSS

SEQ ID NO: 41849 - protein, 122 aa, Artificial Sequence
  Chemically Synthesized
QVQLQESGGGLVQAGGSLRLSCAASGNISSYDGMGWYRQAPGKERELVASIGAGTITNYADSVKGRFTISRDNAKNTVYLQMNSLKPEDTAVYYCAVPAKEPSEDYNDHVYWGQGTQVTVSS

SEQ ID NO: 41850 - protein, 122 aa, Artificial Sequence
  Chemically Synthesized
QVQLQESGGGLVQAGGSLRLSCAASGTIFGRRYMGWYRQAPGKERELVATINYGTITNYADSVKGRFTISRDNAKNTVYLQMNSLKPEDTAVYYCAAIYRALAYRTGRLVYWGQGTQVTVSS

SEQ ID NO: 41851 - protein, 116 aa, Artificial Sequence
  Chemically Synthesized
QVQLQESGGGLVQAGGSLRLSCAASGNMGWYRQAPGKEREFVATIDPGANTYYADSVKGRFTISRDNAKNTVYLQMNSLKPEDTAVYYCAADKGIRDYYYWQLRYWGQGTQVTVSS

SEQ ID NO: 41852 - protein, 122 aa, Artificial Sequence
  Chemically Synthesized
QVQLQESGGGLVQAGGSLRLSCAASGNISAYHFMGWYRQAPGKEREFVASISYGGTTYYADSVKGRFTISRDNAKNTVYLQMNSLKPEDTAVYYCAVYDGVGHQYAWQLSYWGQGTQVTVSS

SEQ ID NO: 41853 - protein, 118 aa, Artificial Sequence
  Chemically Synthesized
QVQLQESGGGLVQAGGSLRLSCAASGSIFDGLLMGWYRQAPGKERELVAAIDTGGSTYYADSVKGRFTISRDNAKNTVYLQMNSLKPEDTAVYYCAAYAFPSVSYAYWGQGTQVTVSS

SEQ ID NO: 41854 - protein, 118 aa, Artificial Sequence
  Chemically Synthesized
QVQLQESGGGLVQAGGSLRLSCAASGSISGPDYMGWYRQAPGKEREFVAAIDRGTSTYYADSVKGRFTISRDNAKNTVYLQMNSLKPEDTAVYYCAVYSRDEHDYAYWGQGTQVTVSS

SEQ ID NO: 41855 - protein, 115 aa, Artificial Sequence
  Chemically Synthesized
QVQLQESGGGLVQAGGSLRLSCAASGTISEYFYMGWYRQAPGKERELVAGISDGTITYYADSVKGRFTISRDNAKNTVYLQMNSLKPEDTAVYYCAVERSTQSYWGQGTQVTVSS

SEQ ID NO: 41856 - protein, 126 aa, Artificial Sequence
  Chemically Synthesized
QVQLQESGGGLVQAGGSLRLSCAASGSISYYVAMGWYRQAPGKERELVAAIANGTNTYYADSVKGRFTISRDNAKNTVYLQMNSLKPEDTAVYYCAVRDGLVRKLSDYDGWGYYYWGQGTQVTVSS

SEQ ID NO: 41857 - protein, 119 aa, Artificial Sequence
  Chemically Synthesized
QVQLQESGGGLVQAGGSLRLSCAASGYISYVPYMGWYRQAPGKERELVAGIGGGSNTNYADSVKGRFTISRDNAKNTVYLQMNSLKPEDTAVYYCAVTYSGVSLDYSYWGQGTQVTVSS

SEQ ID NO: 41858 - protein, 122 aa, Artificial Sequence
  Chemically Synthesized
QVQLQESGGGLVQAGGSLRLSCAASGSISDPQSMGWYRQAPGKEREFVAGIDYGGSTYYADSVKGRFTISRDNAKNTVYLQMNSLKPEDTAVYYCAAALKKYIQDWEDHYYWGQGTQVTVSS

SEQ ID NO: 41859 - protein, 122 aa, Artificial Sequence
  Chemically Synthesized
QVQLQESGGGLVQAGGSLRLSCAASGSISFVTRMGWYRQAPGKERELVASIGGGGSTNYADSVKGRFTISRDNAKNTVYLQMNSLKPEDTAVYYCAVATRASRYYGYYHRYWGQGTQVTVSS

SEQ ID NO: 41860 - protein, 126 aa, Artificial Sequence
  Chemically Synthesized
QVQLQESGGGLVQAGGSLRLSCAASGYIFPLYQMGWYRQAPGKERELVAAISHGSYYQYADSVKGRFTISRDNAKNTVYLQMNSLKPEDTAVYYCAVYLPSGLDPYVFGTDEHGYWGQGTQVTVSS

SEQ ID NO: 41861 - protein, 118 aa, Artificial Sequence
  Chemically Synthesized
QVQLQESGGGLVQAGGSLRLSCAASGYIFGILYMGWYRQAPGKEREFVASIADGGITYYADSVKGRFTISRDNAKNTVYLQMNSLKPEDTAVYYCAVPVIHDYSYAYWGQGTQVTVSS

SEQ ID NO: 41862 - protein, 118 aa, Artificial Sequence
  Chemically Synthesized
QVQLQESGGGLVQAGGSLRLSCAASGTIFWYGYMGWYRQAPGKEREFVAAIARGTSTNYADSVKGRFTISRDNAKNTVYLQMNSLKPEDTAVYYCAVRYYRSARLAYWGQGTQVTVSS

SEQ ID NO: 41863 - protein, 126 aa, Artificial Sequence
  Chemically Synthesized
QVQLQESGGGLVQAGGSLRLSCAASGYISPLYGMGWYRQAPGKEREFVATISKGGITYYADSVKGRFTISRDNAKNTVYLQMNSLKPEDTAVYYCAADAEYPGGYYKWVVNLFVYWGQGTQVTVSS

SEQ ID NO: 41864 - protein, 118 aa, Artificial Sequence
  Chemically Synthesized
QVQLQESGGGLVQAGGSLRLSCAASGTISVGVIMGWYRQAPGKEREFVAAIAWGSNTYYADSVKGRFTISRDNAKNTVYLQMNSLKPEDTAVYYCAADPRYVEEHNYWGQGTQVTVSS

SEQ ID NO: 41865 - protein, 118 aa, Artificial Sequence
  Chemically Synthesized
QVQLQESGGGLVQAGGSLRLSCAASGTIFGCLGMGWYRQAPGKERELVASIDYGATTNYADSVKGRFTISRDNAKNTVYLQMNSLKPEDTAVYYCAVTAYFQGRFFYWGQGTQVTVSS

SEQ ID NO: 41866 - protein, 126 aa, Artificial Sequence
  Chemically Synthesized
QVQLQESGGGLVQAGGSLRLSCAASGSIFPYYGMGWYRQAPGKEREFVAAIGGGTSTYYADSVKGRFTISRDNAKNTVYLQMNSLKPEDTAVYYCAVAFDNIGDPYVYVHYDFDYWGQGTQVTVSS

SEQ ID NO: 41867 - protein, 118 aa, Artificial Sequence
  Chemically Synthesized
QVQLQESGGGLVQAGGSLRLSCAASGYISLNPYMGWYRQAPGKERELVASITFGTSTYYADSVKGRFTISRDNAKNTVYLQMNSLKPEDTAVYYCAVGRVPYVKLGYWGQGTQVTVSS

SEQ ID NO: 41868 - protein, 118 aa, Artificial Sequence
  Chemically Synthesized
QVQLQESGGGLVQAGGSLRLSCAASGTIFGYWYMGWYRQAPGKERELVASIGVGGSTNYADSVKGRFTISRDNAKNTVYLQMNSLKPEDTAVYYCAAGYDTPRTLGYWGQGTQVTVSS

SEQ ID NO: 41869 - protein, 122 aa, Artificial Sequence
  Chemically Synthesized
QVQLQESGGGLVQAGGSLRLSCAASGSISPGRWMGWYRQAPGKEREFVAAIGWGANTYYADSVKGRFTISRDNAKNTVYLQMNSLKPEDTAVYYCAAYYDYITPYGNFHIYWGQGTQVTVSS

SEQ ID NO: 41870 - protein, 111 aa, Artificial Sequence
  Chemically Synthesized
QVQLQESGGGLVQAGGSLRLSCAASGNIFRPDLMGWYRQAPGKEREFVVVIPYADSVKGRFTISRDNAKNTVYLQMNSLKPEDTAVYYCAVPSTRTLTMYWGQGTQVTVSS

SEQ ID NO: 41871 - protein, 118 aa, Artificial Sequence
  Chemically Synthesized
QVQLQESGGGLVQAGGSLRLSCAASGTISFYDYMGWYRQAPGKEREFVASIGYGTTTNYADSVKGRFTISRDNAKNTVYLQMNSLKPEDTAVYYCAVPRQGAHAHTYWGQGTQVTVSS

SEQ ID NO: 41872 - protein, 118 aa, Artificial Sequence
  Chemically Synthesized
QVQLQESGGGLVQAGGSLRLSCAASGTISDGAYMGWYRQAPGKERELVAGIGDGSITNYADSVKGRFTISRDNAKNTVYLQMNSLKPEDTAVYYCAVTRGDQFAFVYWGQGTQVTVSS

SEQ ID NO: 41873 - protein, 122 aa, Artificial Sequence
  Chemically Synthesized
QVQLQESGGGLVQAGGSLRLSCAASGTISPSHEMGWYRQAPGKEREFVASITSGTSTNYADSVKGRFTISRDNAKNTVYLQMNSLKPEDTAVYYCAAYGSPSGPISEGLYYWGQGTQVTVSS

SEQ ID NO: 41874 - protein, 126 aa, Artificial Sequence
  Chemically Synthesized
QVQLQESGGGLVQAGGSLRLSCAASGNIFPGIYYMGWYRQAPGKERELVAAIAYGANTYYADSVKGRFTISRDNAKNTVYLQMNSLKPEDTAVYYCAVVDVVPLPYPLDSVWFIYWGQGTQVTVSS

SEQ ID NO: 41875 - protein, 122 aa, Artificial Sequence
  Chemically Synthesized
QVQLQESGGGLVQAGGSLRLSCAASGNISDSYLMGWYRQAPGKERELVATISDGGTTYYADSVKGRFTISRDNAKNTVYLQMNSLKPEDTAVYYCAAYSPQWYSYLAGHPYWGQGTQVTVSS

SEQ ID NO: 41876 - protein, 126 aa, Artificial Sequence
  Chemically Synthesized
QVQLQESGGGLVQAGGSLRLSCAASGNISDDFDMGWYRQAPGKEREFVATIDPGTITYYADSVKGRFTISRDNAKNTVYLQMNSLKPEDTAVYYCAADEWQPYEVIYVYLVSLYYWGQGTQVTVSS

SEQ ID NO: 41877 - protein, 116 aa, Artificial Sequence
  Chemically Synthesized
QVQLQESGGGLVQAGGSLRLSCAASGNIFDSPRMGWYRQAPGKERELVAGIAAGTTNYADSVKGRFTISRDNAKNTVYLQMNSLKPEDTAVYYCAALVTDNPFLYWGQGTQVTVSS

SEQ ID NO: 41878 - protein, 117 aa, Artificial Sequence
  Chemically Synthesized
QVQLQESGGGLVQAGGSLRLSCAASGYISLYQDMGWYRQAPGKEREFVATIASVLIPYADSVKGRFTISRDNAKNTVYLQMNSLKPEDTAVYYCAAYIYGATAYQYWGQGTQVTVSS

SEQ ID NO: 41879 - protein, 126 aa, Artificial Sequence
  Chemically Synthesized
QVQLQESGGGLVQAGGSLRLSCAASGNISYRDDMGWYRQAPGKERELVAGILGVLLPYADSVKGRFTISRDNAKNTVYLQMNSLKPEDTAVYYCAVAAALPYHGPYYLAILKHYYWGQGTQVTVSS

SEQ ID NO: 41880 - protein, 118 aa, Artificial Sequence
  Chemically Synthesized
QVQLQESGGGLVQAGGSLRLSCAASGNIFSPWWMGWYRQAPGKERELVAAISLVLIPYADSVKGRFTISRDNAKNTVYLQMNSLKPEDTAVYYCAAFGQVSHGNLEYWGQGTQVTVSS

SEQ ID NO: 41881 - protein, 126 aa, Artificial Sequence
  Chemically Synthesized
QVQLQESGGGLVQAGGSLRLSCAASGNIFRVDRMGWYRQAPGKEREFVAAIDGGANTNYADSVKGRFTISRDNAKNTVYLQMNSLKPEDTAVYYCAVDPFRDDIVWYYYAQDHVYWGQGTQVTVSS

SEQ ID NO: 41882 - protein, 118 aa, Artificial Sequence
  Chemically Synthesized
QVQLQESGGGLVQAGGSLRLSCAASGTISSAGPMGWYRQAPGKERELVAGISYGSSTNYADSVKGRFTISRDNAKNTVYLQMNSLKPEDTAVYYCAADATRFYDFSYWGQGTQVTVSS

SEQ ID NO: 41883 - protein, 117 aa, Artificial Sequence
  Chemically Synthesized
QVQLQESGGGLVQAGGSLRLSCAASGSIFEYEYMGWYRQAPGKERELVATIGFGTITNYADSVKGRFTISRDNAKNTVYLQMNSLKPEDTAVYYCAAYHGLSLTLYWGQGTQVTVSS

SEQ ID NO: 41884 - protein, 120 aa, Artificial Sequence
  Chemically Synthesized
QVQLQESGGGLVQAGGSLRLSCAASGYIFSVLMGWYRQAPGKERELAAIDQGASTYYADSVKGRFTISRDNAKNTVYLQMNSLKPEDTAVYYCAAGYDGRLYYYLDFQYWGQGTQVTVSS

SEQ ID NO: 41885 - protein, 122 aa, Artificial Sequence
  Chemically Synthesized
QVQLQESGGGLVQAGGSLRLSCAASGSISAPSGMGWYRQAPGKEREFVAGITGGASTYYADSVKGRFTISRDNAKNTVYLQMNSLKPEDTAVYYCAAIHTEDDSRGVRLEYWGQGTQVTVSS

SEQ ID NO: 41886 - protein, 122 aa, Artificial Sequence
  Chemically Synthesized
QVQLQESGGGLVQAGGSLRLSCAASGTISWQPYMGWYRQAPGKEREFVATIDYGGITYYADSVKGRFTISRDNAKNTVYLQMNSLKPEDTAVYYCAAYGVYNWEYLYFHLYWGQGTQVTVSS

SEQ ID NO: 41887 - protein, 120 aa, Artificial Sequence
  Chemically Synthesized
QVQLQESGGGLVQAGGSLRLSCAASGTIFQGLMGWYRQAPGKERELLPVLVMVLLPYADSVKGRFTISRDNAKNTVYLQMNSLKPEDTAVYYCAVYPRFEVTGVTDHRYWGQGTQVTVSS

SEQ ID NO: 41888 - protein, 119 aa, Artificial Sequence
  Chemically Synthesized
QVQLQESGGGLVQAGGSLRLSCAASGYISWGVTMGWYRQAPGKERELVAALVKVLPYADSVKGRFTISRDNAKNTVYLQMNSLKPEDTAVYYCAVGTLTTTLLLVTLYWGQGTQVTVSS

SEQ ID NO: 41889 - protein, 122 aa, Artificial Sequence
  Chemically Synthesized
QVQLQESGGGLVQAGGSLRLSCAASGYISDETGMGWYRQAPGKERELVASIAQGTTTYYADSVKGRFTISRDNAKNTVYLQMNSLKPEDTAVYYCAVYYLWIVGAIATYVYWGQGTQVTVSS

SEQ ID NO: 41890 - protein, 120 aa, Artificial Sequence
  Chemically Synthesized
QVQLQESGGGLVQAGGSLRLSCAASGYIFDNDLMGWYRQAPGKERELVAGITDGATTNYADSVKGRFTISRDNAKNTVYLQMNSLKPEDTAVYYCAVYGGDPYRNPFVYWGQGTQVTVSS

SEQ ID NO: 41891 - protein, 118 aa, Artificial Sequence
  Chemically Synthesized
QVQLQESGGGLVQAGGSLRLSCAASGSIFYTHDMGWYRQAPGKEREFVASIAKGSSTYYADSVKGRFTISRDNAKNTVYLQMNSLKPEDTAVYYCAADLYRAYRHIYWGQGTQVTVSS

SEQ ID NO: 41892 - protein, 118 aa, Artificial Sequence
  Chemically Synthesized
QVQLQESGGGLVQAGGSLRLSCAASGSIFEYRYMGWYRQAPGKEREFVAAISYGSITYYADSVKGRFTISRDNAKNTVYLQMNSLKPEDTAVYYCAATDDGTDYYGYWGQGTQVTVSS

SEQ ID NO: 41893 - protein, 121 aa, Artificial Sequence
  Chemically Synthesized
QVQLQESGGGLVQAGGSLRLSCAASGSISYRPDMGWYRQAPGKERELVATIGGGSTNYADSVKGRFTISRDNAKNTVYLQMNSLKPEDTAVYYCAAPDYAGSTVALGHQYWGQGTQVTVSS

SEQ ID NO: 41894 - protein, 118 aa, Artificial Sequence
  Chemically Synthesized
QVQLQESGGGLVQAGGSLRLSCAASGYISPAYDMGWYRQAPGKERELVAAIDLGSTTNYADSVKGRFTISRDNAKNTVYLQMNSLKPEDTAVYYCAAGYLTQTYFNYWGQGTQVTVSS

SEQ ID NO: 41895 - protein, 116 aa, Artificial Sequence
  Chemically Synthesized
QVQLQESGGGLVQAGGSLRLSCAASGSISPVDYMGWYRQAPGKEREFVASINAGGSTYYADSVKGRFTISRDNAKNTVYLQMNSLKPEDTAVYYCAARHWQTHDYWGQGTQVTVSS

SEQ ID NO: 41896 - protein, 117 aa, Artificial Sequence
  Chemically Synthesized
QVQLQESGGGLVQAGGSLRLSCAASGNISIHRYMGWYRQAPGKEREFVATIGDGGTPYADSVKGRFTISRDNAKNTVYLQMNSLKPEDTAVYYCAVQGVAYWYYPYWGQGTQVTVSS

SEQ ID NO: 41897 - protein, 122 aa, Artificial Sequence
  Chemically Synthesized
QVQLQESGGGLVQAGGSLRLSCAASGTIFPGSWMGWYRQAPGKEREFVASISPGTSTNYADSVKGRFTISRDNAKNTVYLQMNSLKPEDTAVYYCAVYVRQPDAYVGRHSYWGQGTQVTVSS

SEQ ID NO: 41898 - protein, 122 aa, Artificial Sequence
  Chemically Synthesized
QVQLQESGGGLVQAGGSLRLSCAASGYISSPPPMGWYRQAPGKERELVATIGPGGSTYYADSVKGRFTISRDNAKNTVYLQMNSLKPEDTAVYYCAAWYDPYIHVPSRFVYWGQGTQVTVSS

SEQ ID NO: 41899 - protein, 125 aa, Artificial Sequence
  Chemically Synthesized
QVQLQESGGGLVQAGGSLRLSCAASGTISYLDYMGWYRQAPGKERELVAGINVGASTYYADSVKGRFTISRDNAKNTVYLQMNSLKPEDTAVYYCAADGQSEYRVTVRTTTRMYWGQGTQVTVSS

SEQ ID NO: 41900 - protein, 118 aa, Artificial Sequence
  Chemically Synthesized
QVQLQESGGGLVQAGGSLRLSCAASGNIFDFYTMGWYRQAPGKEREFVASISYGTNTNYADSVKGRFTISRDNAKNTVYLQMNSLKPEDTAVYYCAATYYADFGYTYWGQGTQVTVSS

SEQ ID NO: 41901 - protein, 122 aa, Artificial Sequence
  Chemically Synthesized
QVQLQESGGGLVQAGGSLRLSCAASGTIFPYFYMGWYRQAPGKEREFVAAIGSGAITYYADSVKGRFTISRDNAKNTVYLQMNSLKPEDTAVYYCAAYRGDSQGIGVYFEYWGQGTQVTVSS

SEQ ID NO: 41902 - protein, 118 aa, Artificial Sequence
  Chemically Synthesized
QVQLQESGGGLVQAGGSLRLSCAASGNISVFPAMGWYRQAPGKEREFVASIDYGGITYYADSVKGRFTISRDNAKNTVYLQMNSLKPEDTAVYYCAATYYVYDGLYYWGQGTQVTVSS

SEQ ID NO: 41903 - protein, 118 aa, Artificial Sequence
  Chemically Synthesized
QVQLQESGGGLVQAGGSLRLSCAASGTIFDADYMGWYRQAPGKEREFVASIGAGASTNYADSVKGRFTISRDNAKNTVYLQMNSLKPEDTAVYYCAALIIVGSHHPYWGQGTQVTVSS

SEQ ID NO: 41904 - protein, 115 aa, Artificial Sequence
  Chemically Synthesized
QVQLQESGGGLVQAGGSLRLSCAASGYISWRWFMGWYRQAPGKEREFVATIGRGGITYYADSVKGRFTISRDNAKNTVYLQMNSLKPEDTAVYYCASASNYHYYWGQGTQVTVSS

SEQ ID NO: 41905 - protein, 125 aa, Artificial Sequence
  Chemically Synthesized
QVQLQESGGGLVQAGGSLRLSCAASGNISAAVMGWYRQAPGKERELVASIGPGGITYYADSVKGRFTISRDNAKNTVYLQMNSLKPEDTAVYYCAVDKLKGYPYPDRDRRVHRYWGQGTQVTVSS

SEQ ID NO: 41906 - protein, 125 aa, Artificial Sequence
  Chemically Synthesized
QVQLQESGGGLVQAGGSLRLSCAASGNIFSTTMGWYRQAPGKEREFVAAITPGANTYYADSVKGRFTISRDNAKNTVYLQMNSLKPEDTAVYYCAVDVIYITPIWGDDQYGFGYWGQGTQVTVSS

SEQ ID NO: 41907 - protein, 118 aa, Artificial Sequence
  Chemically Synthesized
QVQLQESGGGLVQAGGSLRLSCAASGYIFTASAMGWYRQAPGKEREFVATIDNGSITNYADSVKGRFTISRDNAKNTVYLQMNSLKPEDTAVYYCAAAYRVWTDLWYWGQGTQVTVSS

SEQ ID NO: 41908 - protein, 126 aa, Artificial Sequence
  Chemically Synthesized
QVQLQESGGGLVQAGGSLRLSCAASGNISPLYGMGWYRQAPGKEREFVAAISPGSITYYADSVKGRFTISRDNAKNTVYLQMNSLKPEDTAVYYCAVYQHYAAYRGRPYAYYLRYWGQGTQVTVSS

SEQ ID NO: 41909 - protein, 117 aa, Artificial Sequence
  Chemically Synthesized
QVQLQESGGGLVQAGGSLRLSCAASGYISRVDDMGWYRQAPGKERELVAAIASVLLPYADSVKGRFTISRDNAKNTVYLQMNSLKPEDTAVYYCAVYASATAKYVYWGQGTQVTVSS

SEQ ID NO: 41910 - protein, 125 aa, Artificial Sequence
  Chemically Synthesized
QVQLQESGGGLVQAGGSLRLSCAASGNIFVSDYMGWYRQAPGKERELVAAISSVLLPYADSVKGRFTISRDNAKNTVYLQMNSLKPEDTAVYYCAVYAAIDTYQYRWWAYPYGYWGQGTQVTVSS

SEQ ID NO: 41911 - protein, 120 aa, Artificial Sequence
  Chemically Synthesized
QVQLQESGGGLVQAGGSLRLSCAASGNISSIQEMGWYRQAPGKERELVASIGQGAITYYADSVKGRFTISRDNAKNTVYLQMNSLKPEDTAVYYCAAYNGYVTYDSLIYWGQGTQVTVSS

SEQ ID NO: 41912 - protein, 118 aa, Artificial Sequence
  Chemically Synthesized
QVQLQESGGGLVQAGGSLRLSCAASGNIFDFAYMGWYRQAPGKERELVAGINTGSNTYYADSVKGRFTISRDNAKNTVYLQMNSLKPEDTAVYYCAAAYYTLDGLVYWGQGTQVTVSS

SEQ ID NO: 41913 - protein, 117 aa, Artificial Sequence
  Chemically Synthesized
QVQLQESGGGLVQAGGSLRLSCAASGYIFPFWVMGWYRQAPGKEREFVAAITFGGSTNYADSVKGRFTISRDNAKNTVYLQMNSLKPEDTAVYYCAVSPYYYLHSYWGQGTQVTVSS

SEQ ID NO: 41914 - protein, 118 aa, Artificial Sequence
  Chemically Synthesized
QVQLQESGGGLVQAGGSLRLSCAASGSISDVYWMGWYRQAPGKEREFVASIASGGTTNYADSVKGRFTISRDNAKNTVYLQMNSLKPEDTAVYYCAAQRGRRYVFRYWGQGTQVTVSS

SEQ ID NO: 41915 - protein, 114 aa, Artificial Sequence
  Chemically Synthesized
QVQLQESGGGLVQAGGSLRLSCAASGSISTIAPMGWYRQAPGKERELVAAINHGGTTYYADSVKGRFTISRDNAKNTVYLQMNSLKPEDTAVYYCAVYYIRSYWGQGTQVTVSS

SEQ ID NO: 41916 - protein, 118 aa, Artificial Sequence
  Chemically Synthesized
QVQLQESGGGLVQAGGSLRLSCAASGTIFQGTRMGWYRQAPGKEREFVASIGHGANTNYADSVKGRFTISRDNAKNTVYLQMNSLKPEDTAVYYCAVGPGTVAYFRYWGQGTQVTVSS

SEQ ID NO: 41917 - protein, 117 aa, Artificial Sequence
  Chemically Synthesized
QVQLQESGGGLVQAGGSLRLSCAASGTISYYSYMGWYRQAPGKERELVASTQGSSTYYADSVKGRFTISRDNAKNTVYLQMNSLKPEDTAVYYCAAIGHDKRHHRYWGQGTQVTVSS

SEQ ID NO: 41918 - protein, 118 aa, Artificial Sequence
  Chemically Synthesized
QVQLQESGGGLVQAGGSLRLSCAASGSIFDQYNMGWYRQAPGKEREFVASIAYGTSTNYADSVKGRFTISRDNAKNTVYLQMNSLKPEDTAVYYCAAILTLYTVLDYWGQGTQVTVSS

SEQ ID NO: 41919 - protein, 126 aa, Artificial Sequence
  Chemically Synthesized
QVQLQESGGGLVQAGGSLRLSCAASGNISYRGRMGWYRQAPGKEREFVASINDGSNTYYADSVKGRFTISRDNAKNTVYLQMNSLKPEDTAVYYCAVSIDHTPDITWYNVHYHDYWGQGTQVTVSS

SEQ ID NO: 41920 - protein, 115 aa, Artificial Sequence
  Chemically Synthesized
QVQLQESGGGLVQAGGSLRLSCAASGNIFFSRFMGWYRQAPGKEREFVAGIDIGATTYYADSVKGRFTISRDNAKNTVYLQMNSLKPEDTAVYYCAADYFFHSYWGQGTQVTVSS

SEQ ID NO: 41921 - protein, 118 aa, Artificial Sequence
  Chemically Synthesized
QVQLQESGGGLVQAGGSLRLSCAASGNIFPLKAMGWYRQAPGKERELVASIATGTITYYADSVKGRFTISRDNAKNTVYLQMNSLKPEDTAVYYCAATYYDYNGHYYWGQGTQVTVSS

SEQ ID NO: 41922 - protein, 115 aa, Artificial Sequence
  Chemically Synthesized
QVQLQESGGGLVQAGGSLRLSCAASGYISTMGWYRQAPGKERELVATIATGGITNYADSVKGRFTISRDNAKNTVYLQMNSLKPEDTAVYYCAVGGDGRDDFDYWGQGTQVTVSS

SEQ ID NO: 41923 - protein, 126 aa, Artificial Sequence
  Chemically Synthesized
QVQLQESGGGLVQAGGSLRLSCAASGSIFRGTYMGWYRQAPGKERELVASIGSGTSTYYADSVKGRFTISRDNAKNTVYLQMNSLKPEDTAVYYCAAVIAWDYKDVQVAYYVHGYWGQGTQVTVSS

SEQ ID NO: 41924 - protein, 121 aa, Artificial Sequence
  Chemically Synthesized
QVQLQESGGGLVQAGGSLRLSCAASGSIFDGYVMGWYRQAPGKERELVASITSVLLPYADSVKGRFTISRDNAKNTVYLQMNSLKPEDTAVYYCAAPITAVPYSYYHLDYWGQGTQVTVSS

SEQ ID NO: 41925 - protein, 122 aa, Artificial Sequence
  Chemically Synthesized
QVQLQESGGGLVQAGGSLRLSCAASGYISYYPYMGWYRQAPGKERELVATIAGGATTNYADSVKGRFTISRDNAKNTVYLQMNSLKPEDTAVYYCAANSARSIWWSYGYYYWGQGTQVTVSS

SEQ ID NO: 41926 - protein, 122 aa, Artificial Sequence
  Chemically Synthesized
QVQLQESGGGLVQAGGSLRLSCAASGTISGDGYMGWYRQAPGKERELVATIGGGASTNYADSVKGRFTISRDNAKNTVYLQMNSLKPEDTAVYYCAAVYNGGRHKTGYLLYWGQGTQVTVSS

SEQ ID NO: 41927 - protein, 126 aa, Artificial Sequence
  Chemically Synthesized
QVQLQESGGGLVQAGGSLRLSCAASGSISFFWNMGWYRQAPGKEREFVATINYGASTNYADSVKGRFTISRDNAKNTVYLQMNSLKPEDTAVYYCAVDDYPWQSVSYSQFVQYGYWGQGTQVTVSS

SEQ ID NO: 41928 - protein, 117 aa, Artificial Sequence
  Chemically Synthesized
QVQLQESGGGLVQAGGSLRLSCAASGTISGPTYMGWYRQAPGKEREFVASIDVGTTTYYADSVKGRFTISRDNAKNTVYLQMNSLKPEDTAVYYCAVYVDHDESFYWGQGTQVTVSS

SEQ ID NO: 41929 - protein, 126 aa, Artificial Sequence
  Chemically Synthesized
QVQLQESGGGLVQAGGSLRLSCAASGNISWYHAMGWYRQAPGKERELVAGITIGGSTYYADSVKGRFTISRDNAKNTVYLQMNSLKPEDTAVYYCAVTFFPYFNVKYVRYSHHAYWGQGTQVTVSS

SEQ ID NO: 41930 - protein, 122 aa, Artificial Sequence
  Chemically Synthesized
QVQLQESGGGLVQAGGSLRLSCAASGNISDYLFMGWYRQAPGKERELVAGINLGGTTNYADSVKGRFTISRDNAKNTVYLQMNSLKPEDTAVYYCAARLYNYTSASVQHSYWGQGTQVTVSS

SEQ ID NO: 41931 - protein, 110 aa, Artificial Sequence
  Chemically Synthesized
QVQLQESGGGLVQAGGSLRLSCAASGTISEYSQMGWYRQAPGKERELVASIGGGITNYADSVKGRFTISRDNAKNTVYLQMNSLKPEDTAVYYCAAYQYWGQGTQVTVSS

SEQ ID NO: 41932 - protein, 117 aa, Artificial Sequence
  Chemically Synthesized
QVQLQESGGGLVQAGGSLRLSCAASGSIFRYPAMGWYRQAPGKEREFVASIDYGSTTNYADSVKGRFTISRDNAKNTVYLQMNSLKPEDTAVYYCAAVDDYGDHRYWGQGTQVTVSS

SEQ ID NO: 41933 - protein, 122 aa, Artificial Sequence
  Chemically Synthesized
QVQLQESGGGLVQAGGSLRLSCAASGTISQQKYMGWYRQAPGKEREFVASISYGASYLYADSVKGRFTISRDNAKNTVYLQMNSLKPEDTAVYYCAVGDQVTSRWSQHFVYWGQGTQVTVSS

SEQ ID NO: 41934 - protein, 126 aa, Artificial Sequence
  Chemically Synthesized
QVQLQESGGGLVQAGGSLRLSCAASGTISDGYDMGWYRQAPGKERELVATIAYGSTTNYADSVKGRFTISRDNAKNTVYLQMNSLKPEDTAVYYCAVTYNGYRNRTTDDISPYAYWGQGTQVTVSS

SEQ ID NO: 41935 - protein, 110 aa, Artificial Sequence
  Chemically Synthesized
QVQLQESGGGLVQAGGSLRLSCAASGTIFYYRTMGWYRQAPGKEREFVAAISYGGNTNYADSVKGRFTISRDNAKNTVYLQMNSLKPEDTAVYYCAVMYWGQGTQVTVSS

SEQ ID NO: 41936 - protein, 117 aa, Artificial Sequence
  Chemically Synthesized
QVQLQESGGGLVQAGGSLRLSCAASGYISYYSMGWYRQAPGKERELVASIGPGASTYYADSVKGRFTISRDNAKNTVYLQMNSLKPEDTAVYYCAAYYYFYIDLYYWGQGTQVTVSS

SEQ ID NO: 41937 - protein, 122 aa, Artificial Sequence
  Chemically Synthesized
QVQLQESGGGLVQAGGSLRLSCAASGTIFPGGYMGWYRQAPGKERELVAAIDLGSSTYYADSVKGRFTISRDNAKNTVYLQMNSLKPEDTAVYYCAVLAVRFQSYRGYLPYWGQGTQVTVSS

SEQ ID NO: 41938 - protein, 118 aa, Artificial Sequence
  Chemically Synthesized
QVQLQESGGGLVQAGGSLRLSCAASGNIFYYVKMGWYRQAPGKERELVAAIARGAITNYADSVKGRFTISRDNAKNTVYLQMNSLKPEDTAVYYCAANSWGYPWHDYWGQGTQVTVSS

SEQ ID NO: 41939 - protein, 121 aa, Artificial Sequence
  Chemically Synthesized
QVQLQESGGGLVQAGGSLRLSCAASGYIFPERLMGWYRQAPGKEREFVAAINSVLLPYADSVKGRFTISRDNAKNTVYLQMNSLKPEDTAVYYCAANQVLGQYGLTNLAYWGQGTQVTVSS

SEQ ID NO: 41940 - protein, 110 aa, Artificial Sequence
  Chemically Synthesized
QVQLQESGGGLVQAGGSLRLSCAASGTIFFYYRMGWYRQAPGKEREFVAAIDTGGSTNYADSVKGRFTISRDNAKNTVYLQMNSLKPEDTAVYYCAYYYWGQGTQVTVSS

SEQ ID NO: 41941 - protein, 118 aa, Artificial Sequence
  Chemically Synthesized
QVQLQESGGGLVQAGGSLRLSCAASGSIFRGRAMGWYRQAPGKEREFVAGIDHGGSTYYADSVKGRFTISRDNAKNTVYLQMNSLKPEDTAVYYCAAYYYNFQDHRYWGQGTQVTVSS

SEQ ID NO: 41942 - protein, 122 aa, Artificial Sequence
  Chemically Synthesized
QVQLQESGGGLVQAGGSLRLSCAASGSISQYSSMGWYRQAPGKEREFVAGITAGGNTYYADSVKGRFTISRDNAKNTVYLQMNSLKPEDTAVYYCAAQTAYRDRFAYAHSYWGQGTQVTVSS

SEQ ID NO: 41943 - protein, 126 aa, Artificial Sequence
  Chemically Synthesized
QVQLQESGGGLVQAGGSLRLSCAASGTISNSWGMGWYRQAPGKERELVASIDYGGNTNYADSVKGRFTISRDNAKNTVYLQMNSLKPEDTAVYYCAAGDVNIRYWPQYTVESYIYWGQGTQVTVSS

SEQ ID NO: 41944 - protein, 118 aa, Artificial Sequence
  Chemically Synthesized
QVQLQESGGGLVQAGGSLRLSCAASGTIFQYRGMGWYRQAPGKERELVAGISWGGTTYYADSVKGRFTISRDNAKNTVYLQMNSLKPEDTAVYYCAARIGYYYPHSYWGQGTQVTVSS

SEQ ID NO: 41945 - protein, 122 aa, Artificial Sequence
  Chemically Synthesized
QVQLQESGGGLVQAGGSLRLSCAASGTIFDGYYMGWYRQAPGKERELVAAIDRGTTTYYADSVKGRFTISRDNAKNTVYLQMNSLKPEDTAVYYCAAHNTGYDWDIRWLTYWGQGTQVTVSS

SEQ ID NO: 41946 - protein, 126 aa, Artificial Sequence
  Chemically Synthesized
QVQLQESGGGLVQAGGSLRLSCAASGSISYDYRMGWYRQAPGKERELVAGISNGGNTNYADSVKGRFTISRDNAKNTVYLQMNSLKPEDTAVYYCAVYGIDYVQSVDRRLSRYFYWGQGTQVTVSS

SEQ ID NO: 41947 - protein, 117 aa, Artificial Sequence
  Chemically Synthesized
QVQLQESGGGLVQAGGSLRLSCAASGNISLPGAMGWYRQAPGKERELVATIDSVVLPYADSVKGRFTISRDNAKNTVYLQMNSLKPEDTAVYYCAVKEHSRDYLDYWGQGTQVTVSS

SEQ ID NO: 41948 - protein, 117 aa, Artificial Sequence
  Chemically Synthesized
QVQLQESGGGLVQAGGSLRLSCAASGTIFPYDSMGWYRQAPGKEREFATIDPGTNTYYADSVKGRFTISRDNAKNTVYLQMNSLKPEDTAVYYCAVNTDDLDYHPYWGQGTQVTVSS

SEQ ID NO: 41949 - protein, 118 aa, Artificial Sequence
  Chemically Synthesized
QVQLQESGGGLVQAGGSLRLSCAASGSISRPDIMGWYRQAPGKEREFVATIGQGTTTNYADSVKGRFTISRDNAKNTVYLQMNSLKPEDTAVYYCAVYIDYIDTHPYWGQGTQVTVSS

SEQ ID NO: 41950 - protein, 113 aa, Artificial Sequence
  Chemically Synthesized
QVQLQESGGGLVQAGGSLRLSCAASGNIFRGDAMGWYRQAPGKEREFVAAINAGTSTYYADSVKGRFTISRDNAKNTVYLQMNSLKPEDTAVYYCAATEIFYWGQGTQVTVSS

SEQ ID NO: 41951 - protein, 122 aa, Artificial Sequence
  Chemically Synthesized
QVQLQESGGGLVQAGGSLRLSCAASGTIFRGRGMGWYRQAPGKEREFVATIAAGSNTYYADSVKGRFTISRDNAKNTVYLQMNSLKPEDTAVYYCAVASYVRAQDYRYLWYWGQGTQVTVSS

SEQ ID NO: 41952 - protein, 118 aa, Artificial Sequence
  Chemically Synthesized
QVQLQESGGGLVQAGGSLRLSCAASGSIFKIDYMGWYRQAPGKERELVASIDYGTSTNYADSVKGRFTISRDNAKNTVYLQMNSLKPEDTAVYYCAVQLSVVQGHGYWGQGTQVTVSS

SEQ ID NO: 41953 - protein, 125 aa, Artificial Sequence
  Chemically Synthesized
QVQLQESGGGLVQAGGSLRLSCAASGYISDATMGWYRQAPGKERELVASISDGASTYYADSVKGRFTISRDNAKNTVYLQMNSLKPEDTAVYYCAVQRQSTRYYTRTVGATHAYWGQGTQVTVSS

SEQ ID NO: 41954 - protein, 117 aa, Artificial Sequence
  Chemically Synthesized
QVQLQESGGGLVQAGGSLRLSCAASGNIFTRLMGWYRQAPGKERELVASISYGAITNYADSVKGRFTISRDNAKNTVYLQMNSLKPEDTAVYYCAAGLGIRDVHSYWGQGTQVTVSS

SEQ ID NO: 41955 - protein, 121 aa, Artificial Sequence
  Chemically Synthesized
QVQLQESGGGLVQAGGSLRLSCAASGYISGYYMGWYRQAPGKERELVASITNGTSTYYADSVKGRFTISRDNAKNTVYLQMNSLKPEDTAVYYCAVETYLSSEAIWKFLYWGQGTQVTVSS

SEQ ID NO: 41956 - protein, 119 aa, Artificial Sequence
  Chemically Synthesized
QVQLQESGGGLVQAGGSLRLSCAASGNISYARYMGWYRQAPGKEREFVAAINYGGTSTNYADSVKGRFTISRDNAKNTVYLQMNSLKPEDTAVYYCAVVNWGYNYHGYWGQGTQVTVSS

SEQ ID NO: 41957 - protein, 122 aa, Artificial Sequence
  Chemically Synthesized
QVQLQESGGGLVQAGGSLRLSCAASGNIFSTYIMGWYRQAPGKEREFVATIDYGATTYYADSVKGRFTISRDNAKNTVYLQMNSLKPEDTAVYYCAVIRTIRYSAVNYYGYWGQGTQVTVSS

SEQ ID NO: 41958 - protein, 117 aa, Artificial Sequence
  Chemically Synthesized
QVQLQESGGGLVQAGGSLRLSCAASGTISSTTMGWYRQAPGKERELVATIDPGGSTNYADSVKGRFTISRDNAKNTVYLQMNSLKPEDTAVYYCAVEVADDIPALYWGQGTQVTVSS

SEQ ID NO: 41959 - protein, 119 aa, Artificial Sequence
  Chemically Synthesized
QVQLQESGGGLVQAGGSLRLSCAASGTISRDVGMGWYRQAPGKERELVASIATGSNTYYADSVKGRFTISRDNAKNTVYLQMNSLKPEDTAVYYCAVFSAPYVPGFAYWGQGTQVTVSS

SEQ ID NO: 41960 - protein, 118 aa, Artificial Sequence
  Chemically Synthesized
QVQLQESGGGLVQAGGSLRLSCAASGYIFSGYDMGWYRQAPGKEREFVAAIAYGGITNYADSVKGRFTISRDNAKNTVYLQMNSLKPEDTAVYYCAVDYLYYAPFTYWGQGTQVTVSS

SEQ ID NO: 41961 - protein, 126 aa, Artificial Sequence
  Chemically Synthesized
QVQLQESGGGLVQAGGSLRLSCAASGYIFYRLYMGWYRQAPGKEREFVAGIGRGTITYYADSVKGRFTISRDNAKNTVYLQMNSLKPEDTAVYYCAVQSTIRYGYTWPTPGYHAYWGQGTQVTVSS

SEQ ID NO: 41962 - protein, 117 aa, Artificial Sequence
  Chemically Synthesized
QVQLQESGGGLVQAGGSLRLSCAASGNILTCSMGWYRQAPGKEREFVAGIGDGGNTNYADSVKGRFTISRDNAKNTVYLQMNSLKPEDTAVYYCAVVQDIRSYHSYWGQGTQVTVSS

SEQ ID NO: 41963 - protein, 118 aa, Artificial Sequence
  Chemically Synthesized
QVQLQESGGGLVQAGGSLRLSCAASGNIFDIAYMGWYRQAPGKERELVATIDSGATTNYADSVKGRFTISRDNAKNTVYLQMNSLKPEDTAVYYCAVDAVDNETYVYWGQGTQVTVSS

SEQ ID NO: 41964 - protein, 122 aa, Artificial Sequence
  Chemically Synthesized
QVQLQESGGGLVQAGGSLRLSCAASGTISYPYGMGWYRQAPGKEREFVATITYGGITYYADSVKGRFTISRDNAKNTVYLQMNSLKPEDTAVYYCAAGPKVYYDGDARHYYWGQGTQVTVSS

SEQ ID NO: 41965 - protein, 117 aa, Artificial Sequence
  Chemically Synthesized
QVQLQESGGGLVQAGGSLRLSCAASGNISHRGSMGWYRQAPGKERELVATITVGAITYYADSVKGRFTISRDNAKNTVYLQMNSLKPEDTAVYYCAVDVADSTLMYWGQGTQVTVSS

SEQ ID NO: 41966 - protein, 126 aa, Artificial Sequence
  Chemically Synthesized
QVQLQESGGGLVQAGGSLRLSCAASGTIFFTYHMGWYRQAPGKEREFVASIDPGSTTYYADSVKGRFTISRDNAKNTVYLQMNSLKPEDTAVYYCAAYEPSSNFGYADSIATLYYWGQGTQVTVSS

SEQ ID NO: 41967 - protein, 126 aa, Artificial Sequence
  Chemically Synthesized
QVQLQESGGGLVQAGGSLRLSCAASGNIFDTYLMGWYRQAPGKERELVATISVGASTYYADSVKGRFTISRDNAKNTVYLQMNSLKPEDTAVYYCAVAQPSYTEFKNDVTGAHFYWGQGTQVTVSS

SEQ ID NO: 41968 - protein, 116 aa, Artificial Sequence
  Chemically Synthesized
QVQLQESGGGLVQAGGSLRLSCAASGNISSWPYMGWYRQAPGKEREFVAAINEGTTTYYADSVKGRFTISRDNAKNTVYLQMNSLKPEDTAVYYCAADYWYVYFYWGQGTQVTVSS

SEQ ID NO: 41969 - protein, 122 aa, Artificial Sequence
  Chemically Synthesized
QVQLQESGGGLVQAGGSLRLSCAASGSIFAYTAMGWYRQAPGKERELVATIGLGANTYYADSVKGRFTISRDNAKNTVYLQMNSLKPEDTAVYYCAANWDAFGHTKPNFGYWGQGTQVTVSS

SEQ ID NO: 41970 - protein, 122 aa, Artificial Sequence
  Chemically Synthesized
QVQLQESGGGLVQAGGSLRLSCAASGYIFPPFLMGWYRQAPGKEREFVAAIAYGTTTYYADSVKGRFTISRDNAKNTVYLQMNSLKPEDTAVYYCAARGWRVFDRDYTFRYWGQGTQVTVSS

SEQ ID NO: 41971 - protein, 118 aa, Artificial Sequence
  Chemically Synthesized
QVQLQESGGGLVQAGGSLRLSCAASGTIFWPYNMGWYRQAPGKERELVAAIGFGTNTYYADSVKGRFTISRDNAKNTVYLQMNSLKPEDTAVYYCAVYGYYDDTHIYWGQGTQVTVSS

SEQ ID NO: 41972 - protein, 114 aa, Artificial Sequence
  Chemically Synthesized
QVQLQESGGGLVQAGGSLRLSCAASGTIFLMGWYRQAPGKERELVAAINDGGITYYADSVKGRFTISRDNAKNTVYLQMNSLKPEDTAVYYCAVSNRRTTTIYWGQGTQVTVSS

SEQ ID NO: 41973 - protein, 126 aa, Artificial Sequence
  Chemically Synthesized
QVQLQESGGGLVQAGGSLRLSCAASGSISSIRPMGWYRQAPGKEREFVAGINNGTITYYADSVKGRFTISRDNAKNTVYLQMNSLKPEDTAVYYCAVGRYYTDSLYYFDDIDYYYWGQGTQVTVSS

SEQ ID NO: 41974 - protein, 122 aa, Artificial Sequence
  Chemically Synthesized
QVQLQESGGGLVQAGGSLRLSCAASGNIFQPYKMGWYRQAPGKEREFVAAINSGTNTYYADSVKGRFTISRDNAKNTVYLQMNSLKPEDTAVYYCAVETRVLTPSDVDLEYWGQGTQVTVSS

SEQ ID NO: 41975 - protein, 118 aa, Artificial Sequence
  Chemically Synthesized
QVQLQESGGGLVQAGGSLRLSCAASGTIFKNSYMGWYRQAPGKEREFVASIAWGGSTNYADSVKGRFTISRDNAKNTVYLQMNSLKPEDTAVYYCAVRVYYYYNHSYWGQGTQVTVSS

SEQ ID NO: 41976 - protein, 121 aa, Artificial Sequence
  Chemically Synthesized
QVQLQESGGGLVQAGGSLRLSCAASGYISLRLFMGWYRQAPGKERELVAGISGGANTYYADSVKGRFTISRDNAKNTVYLQMNSLKPEDTAVYYCAAYADTYWSDDYHAYWGQGTQVTVSS

SEQ ID NO: 41977 - protein, 118 aa, Artificial Sequence
  Chemically Synthesized
QVQLQESGGGLVQAGGSLRLSCAASGSISYGSLMGWYRQAPGKEREFVAGIGTGGITNYADSVKGRFTISRDNAKNTVYLQMNSLKPEDTAVYYCAVSVTYHAYFVYWGQGTQVTVSS

SEQ ID NO: 41978 - protein, 118 aa, Artificial Sequence
  Chemically Synthesized
QVQLQESGGGLVQAGGSLRLSCAASGSIFEPRVMGWYRQAPGKEREFVAGIAFGSNTYYADSVKGRFTISRDNAKNTVYLQMNSLKPEDTAVYYCAVNVVDWRGLVYWGQGTQVTVSS

SEQ ID NO: 41979 - protein, 117 aa, Artificial Sequence
  Chemically Synthesized
QVQLQESGGGLVQAGGSLRLSCAASGNIFDDLGMGWYRQAPGKERELVAAISRGVVPYADSVKGRFTISRDNAKNTVYLQMNSLKPEDTAVYYCAVDVQDYERFVYWGQGTQVTVSS

SEQ ID NO: 41980 - protein, 122 aa, Artificial Sequence
  Chemically Synthesized
QVQLQESGGGLVQAGGSLRLSCAASGTISYYYFMGWYRQAPGKERELVATITRGTSTYYADSVKGRFTISRDNAKNTVYLQMNSLKPEDTAVYYCAVAFPGFVASFSPYIYWGQGTQVTVSS

SEQ ID NO: 41981 - protein, 118 aa, Artificial Sequence
  Chemically Synthesized
QVQLQESGGGLVQAGGSLRLSCAASGYISTFTVMGWYRQAPGKERELVAAINWGSITYYADSVKGRFTISRDNAKNTVYLQMNSLKPEDTAVYYCAARRDPARRHVYWGQGTQVTVSS

SEQ ID NO: 41982 - protein, 118 aa, Artificial Sequence
  Chemically Synthesized
QVQLQESGGGLVQAGGSLRLSCAASGNISAQLDMGWYRQAPGKERELVATIGYGASTYYADSVKGRFTISRDNAKNTVYLQMNSLKPEDTAVYYCAAAGHPQRDYPYWGQGTQVTVSS

SEQ ID NO: 41983 - protein, 118 aa, Artificial Sequence
  Chemically Synthesized
QVQLQESGGGLVQAGGSLRLSCAASGYISLPYPMGWYRQAPGKERELVATIGYGGITNYADSVKGRFTISRDNAKNTVYLQMNSLKPEDTAVYYCAVARYYGYTFYYWGQGTQVTVSS

SEQ ID NO: 41984 - protein, 118 aa, Artificial Sequence
  Chemically Synthesized
QVQLQESGGGLVQAGGSLRLSCAASGNISPNWYMGWYRQAPGKEREFVATITAGGSTNYADSVKGRFTISRDNAKNTVYLQMNSLKPEDTAVYYCAAYGWFPPTHLYWGQGTQVTVSS

SEQ ID NO: 41985 - protein, 122 aa, Artificial Sequence
  Chemically Synthesized
QVQLQESGGGLVQAGGSLRLSCAASGTISRVYDMGWYRQAPGKEREFVATIDYGTSTYYADSVKGRFTISRDNAKNTVYLQMNSLKPEDTAVYYCAALSSVYHPYGRAYNYWGQGTQVTVSS

SEQ ID NO: 41986 - protein, 122 aa, Artificial Sequence
  Chemically Synthesized
QVQLQESGGGLVQAGGSLRLSCAASGSISRPGDMGWYRQAPGKERELVAAIARGGTTNYADSVKGRFTISRDNAKNTVYLQMNSLKPEDTAVYYCAVGWVRGWRWRTQHAYWGQGTQVTVSS

SEQ ID NO: 41987 - protein, 112 aa, Artificial Sequence
  Chemically Synthesized
QVQLQESGGGLVQAGGSLRLSCAASGTIFVYHYMGWYRQAPGKERETYYADSVKGRFTISRDNAKNTVYLQMNSLKPEDTAVYYCAVGPQYGYRREFGFSYWGQGTQVTVSS

SEQ ID NO: 41988 - protein, 114 aa, Artificial Sequence
  Chemically Synthesized
QVQLQESGGGLVQAGGSLRLSCAASGNIFQNTGMGWYRQAPGKERELVAGIDRGTITNYADSVKGRFTISRDNAKNTVYLQMNSLKPEDTAVYYCAAADYHTYWGQGTQVTVSS

SEQ ID NO: 41989 - protein, 122 aa, Artificial Sequence
  Chemically Synthesized
QVQLQESGGGLVQAGGSLRLSCAASGNISGYYVMGWYRQAPGKERELVATIDVGGSTNYADSVKGRFTISRDNAKNTVYLQMNSLKPEDTAVYYCAVYAQYHEVPTVHFGYWGQGTQVTVSS

SEQ ID NO: 41990 - protein, 126 aa, Artificial Sequence
  Chemically Synthesized
QVQLQESGGGLVQAGGSLRLSCAASGYISWADGMGWYRQAPGKEREFVASIDGGANTNYADSVKGRFTISRDNAKNTVYLQMNSLKPEDTAVYYCAVALWEDPYWQPGVGYGHTYWGQGTQVTVSS

SEQ ID NO: 41991 - protein, 118 aa, Artificial Sequence
  Chemically Synthesized
QVQLQESGGGLVQAGGSLRLSCAASGNIFFVYYMGWYRQAPGKEREFVATIGTGASTYYADSVKGRFTISRDNAKNTVYLQMNSLKPEDTAVYYCAVYGDAPAGFHYWGQGTQVTVSS

SEQ ID NO: 41992 - protein, 122 aa, Artificial Sequence
  Chemically Synthesized
QVQLQESGGGLVQAGGSLRLSCAASGSISFDGYMGWYRQAPGKEREFVAAIDGGATTYYADSVKGRFTISRDNAKNTVYLQMNSLKPEDTAVYYCAATHYYPYTYVKSYPYWGQGTQVTVSS

SEQ ID NO: 41993 - protein, 121 aa, Artificial Sequence
  Chemically Synthesized
QVQLQESGGGLVQAGGSLRLSCAASGTIFEGHIMGWYRQAPGKEREFVASIVSVLVPYADSVKGRFTISRDNAKNTVYLQMNSLKPEDTAVYYCAVFWGPIPNIHVDLYYWGQGTQVTVSS

SEQ ID NO: 41994 - protein, 122 aa, Artificial Sequence
  Chemically Synthesized
QVQLQESGGGLVQAGGSLRLSCAASGNIFWTSRMGWYRQAPGKERELVAGINSGASTNYADSVKGRFTISRDNAKNTVYLQMNSLKPEDTAVYYCAAGADEYPSSRDGYGYWGQGTQVTVSS

SEQ ID NO: 41995 - protein, 126 aa, Artificial Sequence
  Chemically Synthesized
QVQLQESGGGLVQAGGSLRLSCAASGTIFPVIRMGWYRQAPGKEREFVAGIGVGSITYYADSVKGRFTISRDNAKNTVYLQMNSLKPEDTAVYYCAAVLAPHVAENDRRRAYHRYWGQGTQVTVSS

SEQ ID NO: 41996 - protein, 122 aa, Artificial Sequence
  Chemically Synthesized
QVQLQESGGGLVQAGGSLRLSCAASGSISYSDLMGWYRQAPGKERELVATIGDGGSTNYADSVKGRFTISRDNAKNTVYLQMNSLKPEDTAVYYCAVFIVIAVARPYLHPYWGQGTQVTVSS

SEQ ID NO: 41997 - protein, 118 aa, Artificial Sequence
  Chemically Synthesized
QVQLQESGGGLVQAGGSLRLSCAASGNIFAYVAMGWYRQAPGKEREFVATIDAGGTTYYADSVKGRFTISRDNAKNTVYLQMNSLKPEDTAVYYCAVASEFWSPHGYWGQGTQVTVSS

SEQ ID NO: 41998 - protein, 118 aa, Artificial Sequence
  Chemically Synthesized
QVQLQESGGGLVQAGGSLRLSCAASGTISDFIWMGWYRQAPGKEREFVAAITNGTTTYYADSVKGRFTISRDNAKNTVYLQMNSLKPEDTAVYYCAVDPYETDYFDYWGQGTQVTVSS

SEQ ID NO: 41999 - protein, 126 aa, Artificial Sequence
  Chemically Synthesized
QVQLQESGGGLVQAGGSLRLSCAASGNIFPTGVMGWYRQAPGKERELVATINPGGNTYYADSVKGRFTISRDNAKNTVYLQMNSLKPEDTAVYYCAVTGAAAGYDILYQRYYLDYWGQGTQVTVSS

SEQ ID NO: 42000 - protein, 122 aa, Artificial Sequence
  Chemically Synthesized
QVQLQESGGGLVQAGGSLRLSCAASGTISPQYSMGWYRQAPGKEREFVASIDQGTNTNYADSVKGRFTISRDNAKNTVYLQMNSLKPEDTAVYYCAALAYYDKYRDVGYYYWGQGTQVTVSS

SEQ ID NO: 42001 - protein, 122 aa, Artificial Sequence
  Chemically Synthesized
QVQLQESGGGLVQAGGSLRLSCAASGNISADHYMGWYRQAPGKERELVASIAVGGNTYYADSVKGRFTISRDNAKNTVYLQMNSLKPEDTAVYYCAVVVTAPSYVPGYHRYWGQGTQVTVSS

SEQ ID NO: 42002 - protein, 118 aa, Artificial Sequence
  Chemically Synthesized
QVQLQESGGGLVQAGGSLRLSCAASGTISDTYWMGWYRQAPGKERELVATIGAGAITNYADSVKGRFTISRDNAKNTVYLQMNSLKPEDTAVYYCAAYSDDEGFFGYWGQGTQVTVSS

SEQ ID NO: 42003 - protein, 126 aa, Artificial Sequence
  Chemically Synthesized
QVQLQESGGGLVQAGGSLRLSCAASGTISIRGLMGWYRQAPGKEREFVAGITDGSNTYYADSVKGRFTISRDNAKNTVYLQMNSLKPEDTAVYYCAVYIRDRYTGRRPRRYELYYWGQGTQVTVSS

SEQ ID NO: 42004 - protein, 118 aa, Artificial Sequence
  Chemically Synthesized
QVQLQESGGGLVQAGGSLRLSCAASGTISAYYAMGWYRQAPGKEREFVASITSGSSTNYADSVKGRFTISRDNAKNTVYLQMNSLKPEDTAVYYCAAPLQFGEDYWYWGQGTQVTVSS

SEQ ID NO: 42005 - protein, 120 aa, Artificial Sequence
  Chemically Synthesized
QVQLQESGGGLVQAGGSLRLSCAASGNISRGDTMGWYRQAPGKEREFVAAITHGASTYYADSVKGRFTISRDNAKNTVYLQMNSLKPEDTAVYYCAARKILGQLWYGSYWGQGTQVTVSS

SEQ ID NO: 42006 - protein, 122 aa, Artificial Sequence
  Chemically Synthesized
QVQLQESGGGLVQAGGSLRLSCAASGSIFLDGYMGWYRQAPGKERELVATIGVGANTNYADSVKGRFTISRDNAKNTVYLQMNSLKPEDTAVYYCAVYPIHPDASSRLYDYWGQGTQVTVSS

SEQ ID NO: 42007 - protein, 116 aa, Artificial Sequence
  Chemically Synthesized
QVQLQESGGGLVQAGGSLRLSCAASGSIFTYLRMGWYRQAPGKERELVAAITTGANTYYADSVKGRFTISRDNAKNTVYLQMNSLKPEDTAVYYCAVDLLGGYSYWGQGTQVTVSS

SEQ ID NO: 42008 - protein, 124 aa, Artificial Sequence
  Chemically Synthesized
QVQLQESGGGLVQAGGSLRLSCAASGTIFDYMGWYRQAPGKERELVAAINTGGNTYYADSVKGRFTISRDNAKNTVYLQMNSLKPEDTAVYYCAAYGYYSQQDLYAAPYPHRYWGQGTQVTVSS

SEQ ID NO: 42009 - protein, 118 aa, Artificial Sequence
  Chemically Synthesized
QVQLQESGGGLVQAGGSLRLSCAASGNISRRHAMGWYRQAPGKERELVATIGYGTSTNYADSVKGRFTISRDNAKNTVYLQMNSLKPEDTAVYYCAVTRQYYRPFAYWGQGTQVTVSS

SEQ ID NO: 42010 - protein, 119 aa, Artificial Sequence
  Chemically Synthesized
QVQLQESGGGLVQAGGSLRLSCAASGYISDFTIMGWYRQAPGKERELVATIGYGSSTNYADSVKGRFTISRDNAKNTVYLQMNSLKPEDTAVYYCAAGSDPRIQDLPYWGQGTQVTVSS

SEQ ID NO: 42011 - protein, 117 aa, Artificial Sequence
  Chemically Synthesized
QVQLQESGGGLVQAGGSLRLSCAASGYIFWRSTMGWYRQAPGKEREFVATITLGSSTNYADSVKGRFTISRDNAKNTVYLQMNSLKPEDTAVYYCAVRYFLWNHYYWGQGTQVTVSS

SEQ ID NO: 42012 - protein, 118 aa, Artificial Sequence
  Chemically Synthesized
QVQLQESGGGLVQAGGSLRLSCAASGTISEAATMGWYRQAPGKERELVATINYGGNTYYADSVKGRFTISRDNAKNTVYLQMNSLKPEDTAVYYCAAYNEGDRDHAYWGQGTQVTVSS

SEQ ID NO: 42013 - protein, 118 aa, Artificial Sequence
  Chemically Synthesized
QVQLQESGGGLVQAGGSLRLSCAASGYISYGPVMGWYRQAPGKERELVASIADGGNTYYADSVKGRFTISRDNAKNTVYLQMNSLKPEDTAVYYCAVYTTAAGRFGYWGQGTQVTVSS

SEQ ID NO: 42014 - protein, 118 aa, Artificial Sequence
  Chemically Synthesized
QVQLQESGGGLVQAGGSLRLSCAASGYISRYTYMGWYRQAPGKERELVATIDRGGNTYYADSVKGRFTISRDNAKNTVYLQMNSLKPEDTAVYYCAVVWLFYGVHPYWGQGTQVTVSS

SEQ ID NO: 42015 - protein, 118 aa, Artificial Sequence
  Chemically Synthesized
QVQLQESGGGLVQAGGSLRLSCAASGSIFYADVMGWYRQAPGKEREFVATISIGGSTYYADSVKGRFTISRDNAKNTVYLQMNSLKPEDTAVYYCAVYRYIGPAYNYWGQGTQVTVSS

SEQ ID NO: 42016 - protein, 122 aa, Artificial Sequence
  Chemically Synthesized
QVQLQESGGGLVQAGGSLRLSCAASGYISQSTPMGWYRQAPGKERELVASIDVGGTTYYADSVKGRFTISRDNAKNTVYLQMNSLKPEDTAVYYCAVADELGQSYAHPFDYWGQGTQVTVSS

SEQ ID NO: 42017 - protein, 122 aa, Artificial Sequence
  Chemically Synthesized
QVQLQESGGGLVQAGGSLRLSCAASGNISRFDRMGWYRQAPGKERELVASIAYGGITNYADSVKGRFTISRDNAKNTVYLQMNSLKPEDTAVYYCAARYYTTFDERGFYSYWGQGTQVTVSS

SEQ ID NO: 42018 - protein, 122 aa, Artificial Sequence
  Chemically Synthesized
QVQLQESGGGLVQAGGSLRLSCAASGSIFPYIFMGWYRQAPGKEREFVAGIGRGGITYYADSVKGRFTISRDNAKNTVYLQMNSLKPEDTAVYYCAVRTYVRTGSLYRHYYWGQGTQVTVSS

SEQ ID NO: 42019 - protein, 118 aa, Artificial Sequence
  Chemically Synthesized
QVQLQESGGGLVQAGGSLRLSCAASGSIFRGEAMGWYRQAPGKERELVAAIDGGGTTYYADSVKGRFTISRDNAKNTVYLQMNSLKPEDTAVYYCAVDGVNYTLFPYWGQGTQVTVSS

SEQ ID NO: 42020 - protein, 126 aa, Artificial Sequence
  Chemically Synthesized
QVQLQESGGGLVQAGGSLRLSCAASGYIFNGLYMGWYRQAPGKERELVASINDGGNTNYADSVKGRFTISRDNAKNTVYLQMNSLKPEDTAVYYCAAYRQLSAWYAWSGSPRLRYWGQGTQVTVSS

SEQ ID NO: 42021 - protein, 122 aa, Artificial Sequence
  Chemically Synthesized
QVQLQESGGGLVQAGGSLRLSCAASGNISGYRDMGWYRQAPGKERELVAGITAGTNTYYADSVKGRFTISRDNAKNTVYLQMNSLKPEDTAVYYCAVWTAYTKTVVYRLTYWGQGTQVTVSS

SEQ ID NO: 42022 - protein, 120 aa, Artificial Sequence
  Chemically Synthesized
QVQLQESGGGLVQAGGSLRLSCAASGSISTVPRMGWYRQAPGKEREFVAGISKGSTYYADSVKGRFTISRDNAKNTVYLQMNSLKPEDTAVYYCAAIYIDPYRVYPFDYWGQGTQVTVSS

SEQ ID NO: 42023 - protein, 117 aa, Artificial Sequence
  Chemically Synthesized
QVQLQESGGGLVQAGGSLRLSCAASGYISSLLMGWYRQAPGKERELVAGISYGSSTNYADSVKGRFTISRDNAKNTVYLQMNSLKPEDTAVYYCAATAPGASRFGYWGQGTQVTVSS

SEQ ID NO: 42024 - protein, 123 aa, Artificial Sequence
  Chemically Synthesized
QVQLQESGGGLVQAGGSLRLSCAASGNISTHGAMGWYRQAPGKEREFVAAIGRGTITYYADSVKGRFTISRDNAKNTVYLQMNSLKPEDTAVYYCAAKLPFWADYDRRAYYYWGQGTQVTVSS

SEQ ID NO: 42025 - protein, 126 aa, Artificial Sequence
  Chemically Synthesized
QVQLQESGGGLVQAGGSLRLSCAASGTIFYVEYMGWYRQAPGKEREFVAAISPGSNTYYADSVKGRFTISRDNAKNTVYLQMNSLKPEDTAVYYCAVAAIYDNTLWTYAYGYHTYWGQGTQVTVSS

SEQ ID NO: 42026 - protein, 122 aa, Artificial Sequence
  Chemically Synthesized
QVQLQESGGGLVQAGGSLRLSCAASGTIFFLDYMGWYRQAPGKERELVAAISGGANTYYADSVKGRFTISRDNAKNTVYLQMNSLKPEDTAVYYCAARYLYKRYNYYPYYYWGQGTQVTVSS

SEQ ID NO: 42027 - protein, 118 aa, Artificial Sequence
  Chemically Synthesized
QVQLQESGGGLVQAGGSLRLSCAASGYIFFAVFMGWYRQAPGKERELVATIAEGGTTYYADSVKGRFTISRDNAKNTVYLQMNSLKPEDTAVYYCAVYYVLQYPHTYWGQGTQVTVSS

SEQ ID NO: 42028 - protein, 122 aa, Artificial Sequence
  Chemically Synthesized
QVQLQESGGGLVQAGGSLRLSCAASGYISYDRGMGWYRQAPGKEREFVAGIGEGGTTNYADSVKGRFTISRDNAKNTVYLQMNSLKPEDTAVYYCAVDWALADRQGYDYYYWGQGTQVTVSS

SEQ ID NO: 42029 - protein, 126 aa, Artificial Sequence
  Chemically Synthesized
QVQLQESGGGLVQAGGSLRLSCAASGYISPLVAMGWYRQAPGKEREFVAAIDPGSSTYYADSVKGRFTISRDNAKNTVYLQMNSLKPEDTAVYYCAVLTVYAVPWQHENPYFFNYWGQGTQVTVSS

SEQ ID NO: 42030 - protein, 118 aa, Artificial Sequence
  Chemically Synthesized
QVQLQESGGGLVQAGGSLRLSCAASGSISYYRYMGWYRQAPGKERELVAGIGKGTNTYYADSVKGRFTISRDNAKNTVYLQMNSLKPEDTAVYYCAVGWYYNTYLIYWGQGTQVTVSS

SEQ ID NO: 42031 - protein, 119 aa, Artificial Sequence
  Chemically Synthesized
QVQLQESGGGLVQAGGSLRLSCAASGNISYRYDMGWYRQAPGKEREFVATIGTGSNTNYADSVKGRFTISRDNAKNTVYLQMNSLKPEDTAVYYCAAWYDSDYYFDDYWGQGTQVTVSS

SEQ ID NO: 42032 - protein, 111 aa, Artificial Sequence
  Chemically Synthesized
QVQLQESGGGLVQAGGSLRLSCAASGNIFGLRDMGWYRQAPGKEREFVAGITSVVLPYADSVKGRFTISRDNAKNTVYLQMNSLKPEDTAVYYCAVGHSYWGQGTQVTVSS

SEQ ID NO: 42033 - protein, 117 aa, Artificial Sequence
  Chemically Synthesized
QVQLQESGGGLVQAGGSLRLSCAASGTISVNQGVMGWYRQAPGKERELVASIAAVLLYADSVKGRFTISRDNAKNTVYLQMNSLKPEDTAVYYCAVRADGGWTLYYWGQGTQVTVSS

SEQ ID NO: 42034 - protein, 118 aa, Artificial Sequence
  Chemically Synthesized
QVQLQESGGGLVQAGGSLRLSCAASGTIFNARTMGWYRQAPGKEREFVATITLGTTTYYADSVKGRFTISRDNAKNTVYLQMNSLKPEDTAVYYCAVNDWLGYLHNYWGQGTQVTVSS

SEQ ID NO: 42035 - protein, 122 aa, Artificial Sequence
  Chemically Synthesized
QVQLQESGGGLVQAGGSLRLSCAASGTISSTRSMGWYRQAPGKEREFVAGINWGTITNYADSVKGRFTISRDNAKNTVYLQMNSLKPEDTAVYYCAAIILQDTPYAPYHYYWGQGTQVTVSS

SEQ ID NO: 42036 - protein, 121 aa, Artificial Sequence
  Chemically Synthesized
QVQLQESGGGLVQAGGSLRLSCAASGTISYPWGMGWYRQAPGKEREFVATIAQGATTNYADSVKGRFTISRDNAKNTVYLQMNSLKPEDTAVYYCAAFSQFWSTTTLTMYWGQGTQVTVSS

SEQ ID NO: 42037 - protein, 122 aa, Artificial Sequence
  Chemically Synthesized
QVQLQESGGGLVQAGGSLRLSCAASGTIFTYIGMGWYRQAPGKEREFVAGIGKGASTNYADSVKGRFTISRDNAKNTVYLQMNSLKPEDTAVYYCAAVAHDPDRVYGSFPYWGQGTQVTVSS

SEQ ID NO: 42038 - protein, 122 aa, Artificial Sequence
  Chemically Synthesized
QVQLQESGGGLVQAGGSLRLSCAASGTISTDGSMGWYRQAPGKERELVASIGGGTITNYADSVKGRFTISRDNAKNTVYLQMNSLKPEDTAVYYCAAFAPYYVAHQVGHGYWGQGTQVTVSS

SEQ ID NO: 42039 - protein, 118 aa, Artificial Sequence
  Chemically Synthesized
QVQLQESGGGLVQAGGSLRLSCAASGNIFVYNVMGWYRQAPGKEREFVAGIAYGATTNYADSVKGRFTISRDNAKNTVYLQMNSLKPEDTAVYYCAALYYDDHYFSYWGQGTQVTVSS

SEQ ID NO: 42040 - protein, 119 aa, Artificial Sequence
  Chemically Synthesized
QVQLQESGGGLVQAGGSLRLSCAASGSISYPEQMGWYRQAPGKEREFVASISYGGTTYYADSVKGRFTISRDNAKNTVYLQMNSLKPEDTAVYYCAAYADNLTGWFYYWGQGTQVTVSS

SEQ ID NO: 42041 - protein, 118 aa, Artificial Sequence
  Chemically Synthesized
QVQLQESGGGLVQAGGSLRLSCAASGTISDDYSMGWYRQAPGKERELVAGITEGANTNYADSVKGRFTISRDNAKNTVYLQMNSLKPEDTAVYYCAVHYQSGELYAYWGQGTQVTVSS

SEQ ID NO: 42042 - protein, 118 aa, Artificial Sequence
  Chemically Synthesized
QVQLQESGGGLVQAGGSLRLSCAASGNISLGYGMGWYRQAPGKEREFVATISHGTNTNYADSVKGRFTISRDNAKNTVYLQMNSLKPEDTAVYYCAAYALYGYDFSYWGQGTQVTVSS

SEQ ID NO: 42043 - protein, 122 aa, Artificial Sequence
  Chemically Synthesized
QVQLQESGGGLVQAGGSLRLSCAASGTISQWGVMGWYRQAPGKERELVATIGRGGTTNYADSVKGRFTISRDNAKNTVYLQMNSLKPEDTAVYYCAAWYRNDGGLYLFHGYWGQGTQVTVSS

SEQ ID NO: 42044 - protein, 117 aa, Artificial Sequence
  Chemically Synthesized
QVQLQESGGGLVQAGGSLRLSCAASGNIFSTVLMGWYRQAPGKEREFCHYWSGWYYQYADSVKGRFTISRDNAKNTVYLQMNSLKPEDTAVYYCAAVSYPGPYHTYWGQGTQVTVSS

SEQ ID NO: 42045 - protein, 118 aa, Artificial Sequence
  Chemically Synthesized
QVQLQESGGGLVQAGGSLRLSCAASGNISPTYPMGWYRQAPGKEREFVAAIDDGGNTYYADSVKGRFTISRDNAKNTVYLQMNSLKPEDTAVYYCAVNTFDGIRHIYWGQGTQVTVSS

SEQ ID NO: 42046 - protein, 118 aa, Artificial Sequence
  Chemically Synthesized
QVQLQESGGGLVQAGGSLRLSCAASGTIFDSDGMGWYRQAPGKERELVAAITYGSSTYYADSVKGRFTISRDNAKNTVYLQMNSLKPEDTAVYYCAAVDHNENYLSYWGQGTQVTVSS

SEQ ID NO: 42047 - protein, 122 aa, Artificial Sequence
  Chemically Synthesized
QVQLQESGGGLVQAGGSLRLSCAASGTISYLDRMGWYRQAPGKEREFVASIAGGGNTNYADSVKGRFTISRDNAKNTVYLQMNSLKPEDTAVYYCAVTTVLAYLYIYLHAYWGQGTQVTVSS

SEQ ID NO: 42048 - protein, 121 aa, Artificial Sequence
  Chemically Synthesized
QVQLQESGGGLVQAGGSLRLSCAASGNISDTYYMGWYRQAPGKERELLPLLVWVVLPYADSVKGRFTISRDNAKNTVYLQMNSLKPEDTAVYYCAVGYPSVGYAGYLYVYWGQGTQVTVSS

SEQ ID NO: 42049 - protein, 126 aa, Artificial Sequence
  Chemically Synthesized
QVQLQESGGGLVQAGGSLRLSCAASGTISGRAYMGWYRQAPGKERELVATISTGTTTNYADSVKGRFTISRDNAKNTVYLQMNSLKPEDTAVYYCAVYWPKWDYLQTWRWRRLYYWGQGTQVTVSS

SEQ ID NO: 42050 - protein, 118 aa, Artificial Sequence
  Chemically Synthesized
QVQLQESGGGLVQAGGSLRLSCAASGSISPGLVMGWYRQAPGKEREFVASIADGANTNYADSVKGRFTISRDNAKNTVYLQMNSLKPEDTAVYYCAGLRKRRPYLAYWGQGTQVTVSS

SEQ ID NO: 42051 - protein, 109 aa, Artificial Sequence
  Chemically Synthesized
QVQLQESGGGLVQAGGSLRLSCAASGNISNFDRMGWYRQAPGKEREFVAGITGGTNTNYADSVKGRFTISRDNAKNTVYLQMNSLKPEDTAVYYCAMYWGQGTQVTVSS

SEQ ID NO: 42052 - protein, 118 aa, Artificial Sequence
  Chemically Synthesized
QVQLQESGGGLVQAGGSLRLSCAASGNISSESAMGWYRQAPGKEREFVAGIDGGAITNYADSVKGRFTISRDNAKNTVYLQMNSLKPEDTAVYYCAALWYSISYHSYWGQGTQVTVSS

SEQ ID NO: 42053 - protein, 126 aa, Artificial Sequence
  Chemically Synthesized
QVQLQESGGGLVQAGGSLRLSCAASGTIFVALYMGWYRQAPGKERELVAAITAGGITYYADSVKGRFTISRDNAKNTVYLQMNSLKPEDTAVYYCAAEDFTYDYYGIDKYAEYWYWGQGTQVTVSS

SEQ ID NO: 42054 - protein, 111 aa, Artificial Sequence
  Chemically Synthesized
QVQLQESGGGLVQAGGSLRLSCAASGNISADLGMGWYRQAPGKEREFVAAINAGGTTYYADSVKGRFTISRDNAKNTVYLQMNSLKPEDTAVYYCAVPQYWGQGTQVTVSS

SEQ ID NO: 42055 - protein, 116 aa, Artificial Sequence
  Chemically Synthesized
QVQLQESGGGLVQAGGSLRLSCAASGNISPNSMGWYRQAPGKERELVAAISGGANTYYADSVKGRFTISRDNAKNTVYLQMNSLKPEDTAVYYCAVYTRSGFNFYWGQGTQVTVSS

SEQ ID NO: 42056 - protein, 118 aa, Artificial Sequence
  Chemically Synthesized
QVQLQESGGGLVQAGGSLRLSCAASGTISSYSLMGWYRQAPGKEREFVAGISQGSITYYADSVKGRFTISRDNAKNTVYLQMNSLKPEDTAVYYCAAYDLNGTTLPYWGQGTQVTVSS

SEQ ID NO: 42057 - protein, 118 aa, Artificial Sequence
  Chemically Synthesized
QVQLQESGGGLVQAGGSLRLSCAASGSIFHYNYMGWYRQAPGKERELVATIAWGGITNYADSVKGRFTISRDNAKNTVYLQMNSLKPEDTAVYYCAVYPWFPYRHGYWGQGTQVTVSS

SEQ ID NO: 42058 - protein, 118 aa, Artificial Sequence
  Chemically Synthesized
QVQLQESGGGLVQAGGSLRLSCAASGYIFPGPVMGWYRQAPGKEREFVAGITQGGSTYYADSVKGRFTISRDNAKNTVYLQMNSLKPEDTAVYYCAVAPDFAQYFLYWGQGTQVTVSS

SEQ ID NO: 42059 - protein, 118 aa, Artificial Sequence
  Chemically Synthesized
QVQLQESGGGLVQAGGSLRLSCAASGNIFGYTSMGWYRQAPGKEREFVAAITIGGNTNYADSVKGRFTISRDNAKNTVYLQMNSLKPEDTAVYYCAALVRSQRYLAYWGQGTQVTVSS

SEQ ID NO: 42060 - protein, 114 aa, Artificial Sequence
  Chemically Synthesized
QVQLQESGGGLVQAGGSLRLSCAASGNIFRHYYMGWYRQAPGKERECYYLYADSVKGRFTISRDNAKNTVYLQMNSLKPEDTAVYYCAVPFYATHDTASSHWYWGQGTQVTVSS

SEQ ID NO: 42061 - protein, 118 aa, Artificial Sequence
  Chemically Synthesized
QVQLQESGGGLVQAGGSLRLSCAASGYISDTNYMGWYRQAPGKEREFVASIDPGTTTNYADSVKGRFTISRDNAKNTVYLQMNSLKPEDTAVYYCAVISYYLTYHYYWGQGTQVTVSS

SEQ ID NO: 42062 - protein, 118 aa, Artificial Sequence
  Chemically Synthesized
QVQLQESGGGLVQAGGSLRLSCAASGTISATYSMGWYRQAPGKEREFVAGINSGSSTNYADSVKGRFTISRDNAKNTVYLQMNSLKPEDTAVYYCAVITLYHYYHSYWGQGTQVTVSS

SEQ ID NO: 42063 - protein, 123 aa, Artificial Sequence
  Chemically Synthesized
QVQLQESGGGLVQAGGSLRLSCAASGNISRVWEMGWYRQAPGKEREFVAAIAAGGITYYADSVKGRFTISRDNAKNTVYLQMNSLKPEDTAVYYCAVSTSKPSSYYWYSLTYWGQGTQVTVSS

SEQ ID NO: 42064 - protein, 117 aa, Artificial Sequence
  Chemically Synthesized
QVQLQESGGGLVQAGGSLRLSCAASGYIFTGFRMGWYRQAPGKERELVASIAYGTTTNYADSVKGRFTISRDNAKNTVYLQMNSLKPEDTAVYYCAASDDAGTSYYWGQGTQVTVSS

SEQ ID NO: 42065 - protein, 121 aa, Artificial Sequence
  Chemically Synthesized
QVQLQESGGGLVQAGGSLRLSCAASGTIFLPYYMGWYRQAPGKERELVATIGGSSTYYADSVKGRFTISRDNAKNTVYLQMNSLKPEDTAVYYCAVRNSKDIYTRAKLHYWGQGTQVTVSS

SEQ ID NO: 42066 - protein, 110 aa, Artificial Sequence
  Chemically Synthesized
QVQLQESGGGLVQAGGSLRLSCAASGYISGGYAMGWYRQAPGKERELVAAIDYGANTYYADSVKGRFTISRDNAKNTVYLQMNSLKPEDTAVYYCAASYWGQGTQVTVSS

SEQ ID NO: 42067 - protein, 121 aa, Artificial Sequence
  Chemically Synthesized
QVQLQESGGGLVQAGGSLRLSCAASGYISYVDYMGWYRQAPGKEREFVATIGEGTITNYADSVKGRFTISRDNAKNTVYLQMNSLKPEDTAVYYCAAVDYTGSNGIRTFYWGQGTQVTVSS

SEQ ID NO: 42068 - protein, 125 aa, Artificial Sequence
  Chemically Synthesized
QVQLQESGGGLVQAGGSLRLSCAASGNISFSVFMGWYRQAPGKEREFVATIAPGGTTNYADSVKGRFTISRDNAKNTVYLQMNSLKPEDTAVYYCAAVKDTDSSTLVTTTVRLYWGQGTQVTVSS

SEQ ID NO: 42069 - protein, 122 aa, Artificial Sequence
  Chemically Synthesized
QVQLQESGGGLVQAGGSLRLSCAASGSIFSDAEMGWYRQAPGKERELVAAITYGSITNYADSVKGRFTISRDNAKNTVYLQMNSLKPEDTAVYYCAVYDYYWFADPFYFLYWGQGTQVTVSS

SEQ ID NO: 42070 - protein, 122 aa, Artificial Sequence
  Chemically Synthesized
QVQLQESGGGLVQAGGSLRLSCAASGTIFRANYMGWYRQAPGKEREFVATIDNGATTNYADSVKGRFTISRDNAKNTVYLQMNSLKPEDTAVYYCAAVAPKVGHDRGYYGYWGQGTQVTVSS

SEQ ID NO: 42071 - protein, 118 aa, Artificial Sequence
  Chemically Synthesized
QVQLQESGGGLVQAGGSLRLSCAASGTISRRLLMGWYRQAPGKEREFVAAISRGGSTNYADSVKGRFTISRDNAKNTVYLQMNSLKPEDTAVYYCAAIATEGGLLYYWGQGTQVTVSS

SEQ ID NO: 42072 - protein, 118 aa, Artificial Sequence
  Chemically Synthesized
QVQLQESGGGLVQAGGSLRLSCAASGYISVWPSMGWYRQAPGKEREFVAGIAAGGITNYADSVKGRFTISRDNAKNTVYLQMNSLKPEDTAVYYCAVPYQYTLRHDYWGQGTQVTVSS

SEQ ID NO: 42073 - protein, 118 aa, Artificial Sequence
  Chemically Synthesized
QVQLQESGGGLVQAGGSLRLSCAASGTIFADYYMGWYRQAPGKERELVAAISYGATTNYADSVKGRFTISRDNAKNTVYLQMNSLKPEDTAVYYCAAAYYFEQLHRYWGQGTQVTVSS

SEQ ID NO: 42074 - protein, 121 aa, Artificial Sequence
  Chemically Synthesized
QVQLQESGGGLVQAGGSLRLSCAASGNIFSDFLMGWYRQAPGKERELVATITSGGTTNYADSVKGRFTISRDNAKNTVYLQMNSLKPEDTAVYYCAAQDFEADSLLVVFYWGQGTQVTVSS

SEQ ID NO: 42075 - protein, 118 aa, Artificial Sequence
  Chemically Synthesized
QVQLQESGGGLVQAGGSLRLSCAASGTIFDWAGMGWYRQAPGKEREFVAAISQGGSTNYADSVKGRFTISRDNAKNTVYLQMNSLKPEDTAVYYCAAIGLADGYHGYWGQGTQVTVSS

SEQ ID NO: 42076 - protein, 118 aa, Artificial Sequence
  Chemically Synthesized
QVQLQESGGGLVQAGGSLRLSCAASGTIFPYYAMGWYRQAPGKEREFVAGIARGASTNYADSVKGRFTISRDNAKNTVYLQMNSLKPEDTAVYYCAAWAFSDRGHAYWGQGTQVTVSS

SEQ ID NO: 42077 - protein, 122 aa, Artificial Sequence
  Chemically Synthesized
QVQLQESGGGLVQAGGSLRLSCAASGNIFIPYGMGWYRQAPGKEREFVATIDPGSNTNYADSVKGRFTISRDNAKNTVYLQMNSLKPEDTAVYYCAVLAKFQGDKGGWYYYWGQGTQVTVSS

SEQ ID NO: 42078 - protein, 118 aa, Artificial Sequence
  Chemically Synthesized
QVQLQESGGGLVQAGGSLRLSCAASGNISPLYDMGWYRQAPGKEREFVAGIAYGATTYYADSVKGRFTISRDNAKNTVYLQMNSLKPEDTAVYYCAVWDNDYYRHDYWGQGTQVTVSS

SEQ ID NO: 42079 - protein, 126 aa, Artificial Sequence
  Chemically Synthesized
QVQLQESGGGLVQAGGSLRLSCAASGTISAHWYMGWYRQAPGKEREFVASISQGGNTNYADSVKGRFTISRDNAKNTVYLQMNSLKPEDTAVYYCAVVYHDTAYYTTNSRAWHYYWGQGTQVTVSS

SEQ ID NO: 42080 - protein, 118 aa, Artificial Sequence
  Chemically Synthesized
QVQLQESGGGLVQAGGSLRLSCAASGSISTGSGMGWYRQAPGKEREFVAGIGAGGTTNYADSVKGRFTISRDNAKNTVYLQMNSLKPEDTAVYYCAVLFTRPRRHYYWGQGTQVTVSS

SEQ ID NO: 42081 - protein, 118 aa, Artificial Sequence
  Chemically Synthesized
QVQLQESGGGLVQAGGSLRLSCAASGTIFYIYYMGWYRQAPGKERELVASIGRGASTNYADSVKGRFTISRDNAKNTVYLQMNSLKPEDTAVYYCAALLYVDRYYHYWGQGTQVTVSS

SEQ ID NO: 42082 - protein, 122 aa, Artificial Sequence
  Chemically Synthesized
QVQLQESGGGLVQAGGSLRLSCAASGNIFGRRYMGWYRQAPGKEREFVAGINAGGITNYADSVKGRFTISRDNAKNTVYLQMNSLKPEDTAVYYCAVLRAGQRWYTNYLRYWGQGTQVTVSS

SEQ ID NO: 42083 - protein, 121 aa, Artificial Sequence
  Chemically Synthesized
QVQLQESGGGLVQAGGSLRLSCAASGTISGVQSMGWYRQAPGKERELVAAIAGGTTYYADSVKGRFTISRDNAKNTVYLQMNSLKPEDTAVYYCAVEARYRQYASLDFGYWGQGTQVTVSS

SEQ ID NO: 42084 - protein, 112 aa, Artificial Sequence
  Chemically Synthesized
QVQLQESGGGLVQAGGSLRLSCAASGSIFHNSMGWYRQAPGKERELVAAIADGGITNYADSVKGRFTISRDNAKNTVYLQMNSLKPEDTAVYYCAVASLMYWGQGTQVTVSS

SEQ ID NO: 42085 - protein, 117 aa, Artificial Sequence
  Chemically Synthesized
QVQLQESGGGLVQAGGSLRLSCAASGSIFRSLMGWYRQAPGKEREFVASINLGGSTYYADSVKGRFTISRDNAKNTVYLQMNSLKPEDTAVYYCAAKFYIVNAHVYWGQGTQVTVSS

SEQ ID NO: 42086 - protein, 116 aa, Artificial Sequence
  Chemically Synthesized
QVQLQESGGGLVQAGGSLRLSCAASGYISWVMGWYRQAPGKEREFVATIAQGGSTYYADSVKGRFTISRDNAKNTVYLQMNSLKPEDTAVYYCAAPFEWRAPHVYWGQGTQVTVSS

SEQ ID NO: 42087 - protein, 126 aa, Artificial Sequence
  Chemically Synthesized
QVQLQESGGGLVQAGGSLRLSCAASGTIFLDGYMGWYRQAPGKERELVATINYGASTYYADSVKGRFTISRDNAKNTVYLQMNSLKPEDTAVYYCAVPRYQYVYWYGDADSYHNYWGQGTQVTVSS

SEQ ID NO: 42088 - protein, 122 aa, Artificial Sequence
  Chemically Synthesized
QVQLQESGGGLVQAGGSLRLSCAASGNISYRYYMGWYRQAPGKEREFVAGIAYGAITNYADSVKGRFTISRDNAKNTVYLQMNSLKPEDTAVYYCAAEYEYEDQYDSPHIYWGQGTQVTVSS

SEQ ID NO: 42089 - protein, 118 aa, Artificial Sequence
  Chemically Synthesized
QVQLQESGGGLVQAGGSLRLSCAASGTIFGRGSMGWYRQAPGKEREFVASIGQGGITNYADSVKGRFTISRDNAKNTVYLQMNSLKPEDTAVYYCAAVQVQPSLLYYWGQGTQVTVSS

SEQ ID NO: 42090 - protein, 118 aa, Artificial Sequence
  Chemically Synthesized
QVQLQESGGGLVQAGGSLRLSCAASGSISRPLSMGWYRQAPGKEREFVAAITSGGTTNYADSVKGRFTISRDNAKNTVYLQMNSLKPEDTAVYYCAAVHARGTRHAYWGQGTQVTVSS

SEQ ID NO: 42091 - protein, 122 aa, Artificial Sequence
  Chemically Synthesized
QVQLQESGGGLVQAGGSLRLSCAASGNIFRFDLMGWYRQAPGKEREFVAGITSGANTNYADSVKGRFTISRDNAKNTVYLQMNSLKPEDTAVYYCAAAGYIYATERRWYYYWGQGTQVTVSS

SEQ ID NO: 42092 - protein, 118 aa, Artificial Sequence
  Chemically Synthesized
QVQLQESGGGLVQAGGSLRLSCAASGTISPGAYMGWYRQAPGKEREFVAAIADGATTNYADSVKGRFTISRDNAKNTVYLQMNSLKPEDTAVYYCAALYRDADWHYYWGQGTQVTVSS

SEQ ID NO: 42093 - protein, 118 aa, Artificial Sequence
  Chemically Synthesized
QVQLQESGGGLVQAGGSLRLSCAASGNIFDELTMGWYRQAPGKEREFVAAISVGTSTNYADSVKGRFTISRDNAKNTVYLQMNSLKPEDTAVYYCAAIRYTKGYLAYWGQGTQVTVSS

SEQ ID NO: 42094 - protein, 118 aa, Artificial Sequence
  Chemically Synthesized
QVQLQESGGGLVQAGGSLRLSCAASGYIFTFKPMGWYRQAPGKERELVAAITRGGNTYYADSVKGRFTISRDNAKNTVYLQMNSLKPEDTAVYYCAVPIGVWRTLLYWGQGTQVTVSS

SEQ ID NO: 42095 - protein, 118 aa, Artificial Sequence
  Chemically Synthesized
QVQLQESGGGLVQAGGSLRLSCAASGSISSNDYMGWYRQAPGKERELVAAIAAGATTNYADSVKGRFTISRDNAKNTVYLQMNSLKPEDTAVYYCAAIDGDDYYYGYWGQGTQVTVSS

SEQ ID NO: 42096 - protein, 118 aa, Artificial Sequence
  Chemically Synthesized
QVQLQESGGGLVQAGGSLRLSCAASGTIFHRLRMGWYRQAPGKEREFVAAIDEGTTTNYADSVKGRFTISRDNAKNTVYLQMNSLKPEDTAVYYCAALTGGVRRHWYWGQGTQVTVSS

SEQ ID NO: 42097 - protein, 122 aa, Artificial Sequence
  Chemically Synthesized
QVQLQESGGGLVQAGGSLRLSCAASGNISYAPVMGWYRQAPGKEREFVASIGDGATTNYADSVKGRFTISRDNAKNTVYLQMNSLKPEDTAVYYCAAGVAYYGTYLAQLSYWGQGTQVTVSS

SEQ ID NO: 42098 - protein, 126 aa, Artificial Sequence
  Chemically Synthesized
QVQLQESGGGLVQAGGSLRLSCAASGNISYIWYMGWYRQAPGKEREFVATITDGGSTYYADSVKGRFTISRDNAKNTVYLQMNSLKPEDTAVYYCAALYYVGNTADYKRPKWHWYWGQGTQVTVSS

SEQ ID NO: 42099 - protein, 122 aa, Artificial Sequence
  Chemically Synthesized
QVQLQESGGGLVQAGGSLRLSCAASGTISDTPVMGWYRQAPGKERELVATIAIGASTNYADSVKGRFTISRDNAKNTVYLQMNSLKPEDTAVYYCAVITLQSSYPYARLAYWGQGTQVTVSS

SEQ ID NO: 42100 - protein, 122 aa, Artificial Sequence
  Chemically Synthesized
QVQLQESGGGLVQAGGSLRLSCAASGYIFSRYYMGWYRQAPGKERELVAGITYGASTYYADSVKGRFTISRDNAKNTVYLQMNSLKPEDTAVYYCAVYPRSRYWSGGRLTYWGQGTQVTVSS

SEQ ID NO: 42101 - protein, 126 aa, Artificial Sequence
  Chemically Synthesized
QVQLQESGGGLVQAGGSLRLSCAASGTISRPRAMGWYRQAPGKERELVAGISAGGNTNYADSVKGRFTISRDNAKNTVYLQMNSLKPEDTAVYYCAVVGQNQDGEPAVYKRYFYYWGQGTQVTVSS

SEQ ID NO: 42102 - protein, 117 aa, Artificial Sequence
  Chemically Synthesized
QVQLQESGGGLVQAGGSLRLSCAASGSIFAWTLMGWYRQAPGKEREFVAAITRGTTYYADSVKGRFTISRDNAKNTVYLQMNSLKPEDTAVYYCAAIDTLVSDLDYWGQGTQVTVSS

SEQ ID NO: 42103 - protein, 117 aa, Artificial Sequence
  Chemically Synthesized
QVQLQESGGGLVQAGGSLRLSCAASGNIFPLDYMGWYRQAPGKEREFVPLLVTVVVPYADSVKGRFTISRDNAKNTVYLQMNSLKPEDTAVYYCAVYRYAGGILSYWGQGTQVTVSS

SEQ ID NO: 42104 - protein, 118 aa, Artificial Sequence
  Chemically Synthesized
QVQLQESGGGLVQAGGSLRLSCAASGNISRYRVMGWYRQAPGKERELVASIGGGASTNYADSVKGRFTISRDNAKNTVYLQMNSLKPEDTAVYYCAALYYYTFWHSYWGQGTQVTVSS

SEQ ID NO: 42105 - protein, 118 aa, Artificial Sequence
  Chemically Synthesized
QVQLQESGGGLVQAGGSLRLSCAASGNIFHSTAMGWYRQAPGKEREFVATINWGSNTNYADSVKGRFTISRDNAKNTVYLQMNSLKPEDTAVYYCAAVQLDGRYHYYWGQGTQVTVSS

SEQ ID NO: 42106 - protein, 118 aa, Artificial Sequence
  Chemically Synthesized
QVQLQESGGGLVQAGGSLRLSCAASGNISQSDVMGWYRQAPGKEREFVAGINAGANTNYADSVKGRFTISRDNAKNTVYLQMNSLKPEDTAVYYCAALGGDGPYYHYWGQGTQVTVSS

SEQ ID NO: 42107 - protein, 122 aa, Artificial Sequence
  Chemically Synthesized
QVQLQESGGGLVQAGGSLRLSCAASGNISVDTVMGWYRQAPGKEREFVATIGSGGTTNYADSVKGRFTISRDNAKNTVYLQMNSLKPEDTAVYYCAADEYIDRSWRRDYGYWGQGTQVTVSS

SEQ ID NO: 42108 - protein, 120 aa, Artificial Sequence
  Chemically Synthesized
QVQLQESGGGLVQAGGSLRLSCAASGYISKVRAMGWYRQAPGKEREFVASINGGNTNYADSVKGRFTISRDNAKNTVYLQMNSLKPEDTAVYYCAAIVWSNAVRHYYPYWGQGTQVTVSS

SEQ ID NO: 42109 - protein, 120 aa, Artificial Sequence
  Chemically Synthesized
QVQLQESGGGLVQAGGSLRLSCAASGNISYFGYMGWYRQAPGKERELVAGINAGSITNYADSVKGRFTISRDNAKNTVYLQMNSLKPEDTAVYYCAVNNAYNRVLRHWYWGQGTQVTVSS

SEQ ID NO: 42110 - protein, 118 aa, Artificial Sequence
  Chemically Synthesized
QVQLQESGGGLVQAGGSLRLSCAASGNISDRLTMGWYRQAPGKERELVASINDGSITNYADSVKGRFTISRDNAKNTVYLQMNSLKPEDTAVYYCAALRYKNVYHGYWGQGTQVTVSS

SEQ ID NO: 42111 - protein, 125 aa, Artificial Sequence
  Chemically Synthesized
QVQLQESGGGLVQAGGSLRLSCAASGSIFLNYDMGWYRQAPGKERELVAAISVGGITNYADSVKGRFTISRDNAKNTVYLQMNSLKPEDTAVYYCAADDYYTYDSSLTNLTIIYWGQGTQVTVSS

SEQ ID NO: 42112 - protein, 118 aa, Artificial Sequence
  Chemically Synthesized
QVQLQESGGGLVQAGGSLRLSCAASGTISGQLYMGWYRQAPGKEREFVAAIGSGANTNYADSVKGRFTISRDNAKNTVYLQMNSLKPEDTAVYYCAAIRSVYPYLDYWGQGTQVTVSS

SEQ ID NO: 42113 - protein, 126 aa, Artificial Sequence
  Chemically Synthesized
QVQLQESGGGLVQAGGSLRLSCAASGTIFYSTVMGWYRQAPGKEREFVAGIGDGANTNYADSVKGRFTISRDNAKNTVYLQMNSLKPEDTAVYYCAVVLRGNRHSQSPTVRYHYYWGQGTQVTVSS

SEQ ID NO: 42114 - protein, 118 aa, Artificial Sequence
  Chemically Synthesized
QVQLQESGGGLVQAGGSLRLSCAASGNISEGHIMGWYRQAPGKEREFVAGIGYGANTNYADSVKGRFTISRDNAKNTVYLQMNSLKPEDTAVYYCAAVGPKVGYLYYWGQGTQVTVSS

SEQ ID NO: 42115 - protein, 113 aa, Artificial Sequence
  Chemically Synthesized
QVQLQESGGGLVQAGGSLRLSCAASGTIMGWYRQAPGKERELVATITEGGTTYYADSVKGRFTISRDNAKNTVYLQMNSLKPEDTAVYYCAAGYRGYQSHPYWGQGTQVTVSS

SEQ ID NO: 42116 - protein, 118 aa, Artificial Sequence
  Chemically Synthesized
QVQLQESGGGLVQAGGSLRLSCAASGTISGRVTMGWYRQAPGKEREFVAGITDGSSTNYADSVKGRFTISRDNAKNTVYLQMNSLKPEDTAVYYCAVVVVGYGRYAYWGQGTQVTVSS

SEQ ID NO: 42117 - protein, 118 aa, Artificial Sequence
  Chemically Synthesized
QVQLQESGGGLVQAGGSLRLSCAASGYIFSGAPMGWYRQAPGKEREFVATIADGGITNYADSVKGRFTISRDNAKNTVYLQMNSLKPEDTAVYYCAASGLTNDYYDYWGQGTQVTVSS

SEQ ID NO: 42118 - protein, 118 aa, Artificial Sequence
  Chemically Synthesized
QVQLQESGGGLVQAGGSLRLSCAASGNISGWTGMGWYRQAPGKEREFVATINRGGNTNYADSVKGRFTISRDNAKNTVYLQMNSLKPEDTAVYYCAVLEGIRTRHWYWGQGTQVTVSS

SEQ ID NO: 42119 - protein, 118 aa, Artificial Sequence
  Chemically Synthesized
QVQLQESGGGLVQAGGSLRLSCAASGTIFDRAFMGWYRQAPGKERELVAAIADGTTTNYADSVKGRFTISRDNAKNTVYLQMNSLKPEDTAVYYCAVVTYYVGWHGYWGQGTQVTVSS

SEQ ID NO: 42120 - protein, 116 aa, Artificial Sequence
  Chemically Synthesized
QVQLQESGGGLVQAGGSLRLSCAASGYISTISTMGWYRQAPGKEREFVAAIDRGSTTNYADSVKGRFTISRDNAKNTVYLQMNSLKPEDTAVYYCAYVRSTRLYYWGQGTQVTVSS

SEQ ID NO: 42121 - protein, 119 aa, Artificial Sequence
  Chemically Synthesized
QVQLQESGGGLVQAGGSLRLSCAASGSISRYLGMGWYRQAPGKEREFVATIDYGGTTNYADSVKGRFTISRDNAKNTVYLQMNSLKPEDTAVYYCAAIERTAYIYHFYWGQGTQVTVSS

SEQ ID NO: 42122 - protein, 118 aa, Artificial Sequence
  Chemically Synthesized
QVQLQESGGGLVQAGGSLRLSCAASGTIFDKGSMGWYRQAPGKEREFVATINSGGSTNYADSVKGRFTISRDNAKNTVYLQMNSLKPEDTAVYYCAAIYYRGVWHYYWGQGTQVTVSS

SEQ ID NO: 42123 - protein, 122 aa, Artificial Sequence
  Chemically Synthesized
QVQLQESGGGLVQAGGSLRLSCAASGYISGYPYMGWYRQAPGKERELVATINTGGITNYADSVKGRFTISRDNAKNTVYLQMNSLKPEDTAVYYCAVAYSDSLNGRVYFTYWGQGTQVTVSS

SEQ ID NO: 42124 - protein, 122 aa, Artificial Sequence
  Chemically Synthesized
QVQLQESGGGLVQAGGSLRLSCAASGTISRTDAMGWYRQAPGKEREFVAAIDFGGTTNYADSVKGRFTISRDNAKNTVYLQMNSLKPEDTAVYYCAAVGLDRRYGNGRYGYWGQGTQVTVSS

SEQ ID NO: 42125 - protein, 121 aa, Artificial Sequence
  Chemically Synthesized
QVQLQESGGGLVQAGGSLRLSCAASGYISSDDVMGWYRQAPGKEREFVAGINSGANTNYADSVKGRFTISRDNAKNTVYLQMNSLKPEDTAVYYCAAEYYDFLSLLSRIYWGQGTQVTVSS

SEQ ID NO: 42126 - protein, 126 aa, Artificial Sequence
  Chemically Synthesized
QVQLQESGGGLVQAGGSLRLSCAASGSISRQSYMGWYRQAPGKEREFVAAIDDGANTYYADSVKGRFTISRDNAKNTVYLQMNSLKPEDTAVYYCAVLNGDDDTRASYGSRYLTYWGQGTQVTVSS

SEQ ID NO: 42127 - protein, 117 aa, Artificial Sequence
  Chemically Synthesized
QVQLQESGGGLVQAGGSLRLSCAASGYISPAVVMGWYRQAPGKEREFVATIAWGTTYYADSVKGRFTISRDNAKNTVYLQMNSLKPEDTAVYYCAVQRVTPPYYRYWGQGTQVTVSS

SEQ ID NO: 42128 - protein, 118 aa, Artificial Sequence
  Chemically Synthesized
QVQLQESGGGLVQAGGSLRLSCAASGTIFGQGNMGWYRQAPGKEREFVASIGLGSSTNYADSVKGRFTISRDNAKNTVYLQMNSLKPEDTAVYYCAAIVGGRAWHYYWGQGTQVTVSS

SEQ ID NO: 42129 - protein, 122 aa, Artificial Sequence
  Chemically Synthesized
QVQLQESGGGLVQAGGSLRLSCAASGTIFALSTMGWYRQAPGKEREFVAGINYGSTTYYADSVKGRFTISRDNAKNTVYLQMNSLKPEDTAVYYCAVDLLHFRPNTGDLVYWGQGTQVTVSS

SEQ ID NO: 42130 - protein, 126 aa, Artificial Sequence
  Chemically Synthesized
QVQLQESGGGLVQAGGSLRLSCAASGNISYREDMGWYRQAPGKERELVATISQGTTTNYADSVKGRFTISRDNAKNTVYLQMNSLKPEDTAVYYCAAEYPSIYFWKYLNRFDHSYWGQGTQVTVSS

SEQ ID NO: 42131 - protein, 118 aa, Artificial Sequence
  Chemically Synthesized
QVQLQESGGGLVQAGGSLRLSCAASGTIFSPWYMGWYRQAPGKEREFVASINIGASTNYADSVKGRFTISRDNAKNTVYLQMNSLKPEDTAVYYCAAVGYSRGYFYYWGQGTQVTVSS

SEQ ID NO: 42132 - protein, 124 aa, Artificial Sequence
  Chemically Synthesized
QVQLQESGGGLVQAGGSLRLSCAASGSISGPHRMGWYRQAPGKEREFVAAISDGGITYYADSVKGRFTISRDNAKNTVYLQMNSLKPEDTAVYYCAVLQIVRQQGYDQSYLWYWGQGTQVTVSS

SEQ ID NO: 42133 - protein, 118 aa, Artificial Sequence
  Chemically Synthesized
QVQLQESGGGLVQAGGSLRLSCAASGTISRRYGMGWYRQAPGKEREFVAGIAYGSNTNYADSVKGRFTISRDNAKNTVYLQMNSLKPEDTAVYYCAVVYFETQFYHYWGQGTQVTVSS

SEQ ID NO: 42134 - protein, 119 aa, Artificial Sequence
  Chemically Synthesized
QVQLQESGGGLVQAGGSLRLSCAASGSISNYRYMGWYRQAPGKERELVAGIDVGGSTYYADSVKGRFTISRDNAKNTVYLQMNSLKPEDTAVYYCAVQGYTYYDLYDYWGQGTQVTVSS

SEQ ID NO: 42135 - protein, 117 aa, Artificial Sequence
  Chemically Synthesized
QVQLQESGGGLVQAGGSLRLSCAASGYISYIVMGWYRQAPGKEREFVAGIGYGGSTNYADSVKGRFTISRDNAKNTVYLQMNSLKPEDTAVYYCAADNIDYNDYIYWGQGTQVTVSS

SEQ ID NO: 42136 - protein, 126 aa, Artificial Sequence
  Chemically Synthesized
QVQLQESGGGLVQAGGSLRLSCAASGYIFGPFRMGWYRQAPGKEREFVAAIDDGATTNYADSVKGRFTISRDNAKNTVYLQMNSLKPEDTAVYYCAVVIQDHSYGEQRLGTWHYYWGQGTQVTVSS

SEQ ID NO: 42137 - protein, 118 aa, Artificial Sequence
  Chemically Synthesized
QVQLQESGGGLVQAGGSLRLSCAASGTIFYTYRMGWYRQAPGKEREFVAGIANGTTTYYADSVKGRFTISRDNAKNTVYLQMNSLKPEDTAVYYCAVVTRTDRYHGYWGQGTQVTVSS

SEQ ID NO: 42138 - protein, 122 aa, Artificial Sequence
  Chemically Synthesized
QVQLQESGGGLVQAGGSLRLSCAASGSIFRPPYMGWYRQAPGKEREFVATIAPGTITNYADSVKGRFTISRDNAKNTVYLQMNSLKPEDTAVYYCAVYRVHPFYIDTQHYYWGQGTQVTVSS

SEQ ID NO: 42139 - protein, 126 aa, Artificial Sequence
  Chemically Synthesized
QVQLQESGGGLVQAGGSLRLSCAASGSIFGGSVMGWYRQAPGKERELVAAINLGTTTYYADSVKGRFTISRDNAKNTVYLQMNSLKPEDTAVYYCAVIDGDYDGPYYHQEDIFLYWGQGTQVTVSS

SEQ ID NO: 42140 - protein, 118 aa, Artificial Sequence
  Chemically Synthesized
QVQLQESGGGLVQAGGSLRLSCAASGTIFFYYNMGWYRQAPGKEREFVATIGGGSSTNYADSVKGRFTISRDNAKNTVYLQMNSLKPEDTAVYYCAVTYLTQGTYNYWGQGTQVTVSS

SEQ ID NO: 42141 - protein, 118 aa, Artificial Sequence
  Chemically Synthesized
QVQLQESGGGLVQAGGSLRLSCAASGTISDRIGMGWYRQAPGKEREFVAGISDGANTNYADSVKGRFTISRDNAKNTVYLQMNSLKPEDTAVYYCAAILFYFEWLWYWGQGTQVTVSS

SEQ ID NO: 42142 - protein, 118 aa, Artificial Sequence
  Chemically Synthesized
QVQLQESGGGLVQAGGSLRLSCAASGTIFVYYVMGWYRQAPGKERELVASITRGAITNYADSVKGRFTISRDNAKNTVYLQMNSLKPEDTAVYYCAALEWVDYWHGYWGQGTQVTVSS

SEQ ID NO: 42143 - protein, 118 aa, Artificial Sequence
  Chemically Synthesized
QVQLQESGGGLVQAGGSLRLSCAASGSISDTYSMGWYRQAPGKEREFVAGIGSGGITNYADSVKGRFTISRDNAKNTVYLQMNSLKPEDTAVYYCAALDYQYHRHFYWGQGTQVTVSS

SEQ ID NO: 42144 - protein, 118 aa, Artificial Sequence
  Chemically Synthesized
QVQLQESGGGLVQAGGSLRLSCAASGSISGTSQMGWYRQAPGKEREFVASITSGGNTNYADSVKGRFTISRDNAKNTVYLQMNSLKPEDTAVYYCAVVDYDYEWHGYWGQGTQVTVSS

SEQ ID NO: 42145 - protein, 117 aa, Artificial Sequence
  Chemically Synthesized
QVQLQESGGGLVQAGGSLRLSCAASGTISYNIYMGWYRQAPGKEREFVATIDGGSTNYADSVKGRFTISRDNAKNTVYLQMNSLKPEDTAVYYCAAVIKGDGWYYYWGQGTQVTVSS

SEQ ID NO: 42146 - protein, 118 aa, Artificial Sequence
  Chemically Synthesized
QVQLQESGGGLVQAGGSLRLSCAASGSIFSLRVMGWYRQAPGKEREFVAGITDGAITNYADSVKGRFTISRDNAKNTVYLQMNSLKPEDTAVYYCAAISQDPYYHGYWGQGTQVTVSS

SEQ ID NO: 42147 - protein, 116 aa, Artificial Sequence
  Chemically Synthesized
QVQLQESGGGLVQAGGSLRLSCAASGSIRVSMGWYRQAPGKEREFVAGINEGSNTYYADSVKGRFTISRDNAKNTVYLQMNSLKPEDTAVYYCAAEYTDQNRLDYWGQGTQVTVSS

SEQ ID NO: 42148 - protein, 117 aa, Artificial Sequence
  Chemically Synthesized
QVQLQESGGGLVQAGGSLRLSCAASGSISRDTPMGWYRQAPGKEREFVAGINEGGNTYYADSVKGRFTISRDNAKNTVYLQMNSLKPEDTAVYYCAVITDEDYSYYWGQGTQVTVSS

SEQ ID NO: 42149 - protein, 118 aa, Artificial Sequence
  Chemically Synthesized
QVQLQESGGGLVQAGGSLRLSCAASGYISVAYYMGWYRQAPGKERELVAAIDSGSTTNYADSVKGRFTISRDNAKNTVYLQMNSLKPEDTAVYYCAADLWQPDYLEYWGQGTQVTVSS

SEQ ID NO: 42150 - protein, 118 aa, Artificial Sequence
  Chemically Synthesized
QVQLQESGGGLVQAGGSLRLSCAASGNISLVYYMGWYRQAPGKERELVATIADGSNTYYADSVKGRFTISRDNAKNTVYLQMNSLKPEDTAVYYCAVDIGYITVLVYWGQGTQVTVSS

SEQ ID NO: 42151 - protein, 112 aa, Artificial Sequence
  Chemically Synthesized
QVQLQESGGGLVQAGGSLRLSCAASGYISDVRFMGWYRQAPGKEREFVAAIGKGGTTNYADSVKGRFTISRDNAKNTVYLQMNSLKPEDTAVYYCAAVSMYWGQGTQVTVSS

SEQ ID NO: 42152 - protein, 114 aa, Artificial Sequence
  Chemically Synthesized
QVQLQESGGGLVQAGGSLRLSCAASGYISTLYSMGWYRQAPGKERELVASISWGGITYYADSVKGRFTISRDNAKNTVYLQMNSLKPEDTAVYYCALVTTLMYWGQGTQVTVSS

SEQ ID NO: 42153 - protein, 122 aa, Artificial Sequence
  Chemically Synthesized
QVQLQESGGGLVQAGGSLRLSCAASGTIFYADGMGWYRQAPGKEREFVAAIGYGGTTNYADSVKGRFTISRDNAKNTVYLQMNSLKPEDTAVYYCAVDHLTYDLPDYGYDYWGQGTQVTVSS

SEQ ID NO: 42154 - protein, 116 aa, Artificial Sequence
  Chemically Synthesized
QVQLQESGGGLVQAGGSLRLSCAASGTISYDPDMGWYRQAPGKEREFVAMVSVLVPYADSVKGRFTISRDNAKNTVYLQMNSLKPEDTAVYYCAAQLYQDGPHSYWGQGTQVTVSS

SEQ ID NO: 42155 - protein, 118 aa, Artificial Sequence
  Chemically Synthesized
QVQLQESGGGLVQAGGSLRLSCAASGSISSGRYMGWYRQAPGKEREFVATIDVGTSTNYADSVKGRFTISRDNAKNTVYLQMNSLKPEDTAVYYCAARYYQTALYGYWGQGTQVTVSS

SEQ ID NO: 42156 - protein, 118 aa, Artificial Sequence
  Chemically Synthesized
QVQLQESGGGLVQAGGSLRLSCAASGSIFADDTMGWYRQAPGKERELVASIAQGSNTNYADSVKGRFTISRDNAKNTVYLQMNSLKPEDTAVYYCAAINVDDQLFLYWGQGTQVTVSS

SEQ ID NO: 42157 - protein, 124 aa, Artificial Sequence
  Chemically Synthesized
QVQLQESGGGLVQAGGSLRLSCAASGYISAYVMGWYRQAPGKERELVATIDGGTITNYADSVKGRFTISRDNAKNTVYLQMNSLKPEDTAVYYCAVYDRGSWTTISRVVLRIYWGQGTQVTVSS

SEQ ID NO: 42158 - protein, 117 aa, Artificial Sequence
  Chemically Synthesized
QVQLQESGGGLVQAGGSLRLSCAASGTIFSTYSMGWYRQAPGKERELVAVLVSVLLPYADSVKGRFTISRDNAKNTVYLQMNSLKPEDTAVYYCAAGYYHVAYLHYWGQGTQVTVSS

SEQ ID NO: 42159 - protein, 110 aa, Artificial Sequence
  Chemically Synthesized
QVQLQESGGGLVQAGGSLRLSCAASGSISYDYYMGWYRQAPGKERELVATYADSVKGRFTISRDNAKNTVYLQMNSLKPEDTAVYYCAADSIRDGTFTYWGQGTQVTVSS

SEQ ID NO: 42160 - protein, 117 aa, Artificial Sequence
  Chemically Synthesized
QVQLQESGGGLVQAGGSLRLSCAASGYISATFMGWYRQAPGKEREFVATINVGGNTYYADSVKGRFTISRDNAKNTVYLQMNSLKPEDTAVYYCAARSFYEPGHAYWGQGTQVTVSS

SEQ ID NO: 42161 - protein, 122 aa, Artificial Sequence
  Chemically Synthesized
QVQLQESGGGLVQAGGSLRLSCAASGYIFDDDGMGWYRQAPGKERELVAGINIGTSTYYADSVKGRFTISRDNAKNTVYLQMNSLKPEDTAVYYCAARDSAGSGASRYYPYWGQGTQVTVSS

SEQ ID NO: 42162 - protein, 126 aa, Artificial Sequence
  Chemically Synthesized
QVQLQESGGGLVQAGGSLRLSCAASGYISPWLPMGWYRQAPGKERELVAGIDWGSNTNYADSVKGRFTISRDNAKNTVYLQMNSLKPEDTAVYYCAVSYRDGTAAFYVGGRALTYWGQGTQVTVSS

SEQ ID NO: 42163 - protein, 118 aa, Artificial Sequence
  Chemically Synthesized
QVQLQESGGGLVQAGGSLRLSCAASGNIFVDHPMGWYRQAPGKEREFVASIDAGGTTNYADSVKGRFTISRDNAKNTVYLQMNSLKPEDTAVYYCAAELRRWWPFFYWGQGTQVTVSS

SEQ ID NO: 42164 - protein, 113 aa, Artificial Sequence
  Chemically Synthesized
QVQLQESGGGLVQAGGSLRLSCAASGNISDDPSMGWYRQAPGKEREFVASIDSGGSTYYADSVKGRFTISRDNAKNTVYLQMNSLKPEDTAVYYCAAGGRQYWGQGTQVTVSS

SEQ ID NO: 42165 - protein, 126 aa, Artificial Sequence
  Chemically Synthesized
QVQLQESGGGLVQAGGSLRLSCAASGNISAYPYMGWYRQAPGKERELVAAISAGATTYYADSVKGRFTISRDNAKNTVYLQMNSLKPEDTAVYYCAADPPADTEWIVAATDAFSYWGQGTQVTVSS

SEQ ID NO: 42166 - protein, 122 aa, Artificial Sequence
  Chemically Synthesized
QVQLQESGGGLVQAGGSLRLSCAASGNIFYYVGMGWYRQAPGKERELVAGISQGSSTNYADSVKGRFTISRDNAKNTVYLQMNSLKPEDTAVYYCAATYGAYWDPIYGHDYWGQGTQVTVSS

SEQ ID NO: 42167 - protein, 122 aa, Artificial Sequence
  Chemically Synthesized
QVQLQESGGGLVQAGGSLRLSCAASGSIFKRDVMGWYRQAPGKERELVASIAGGANTNYADSVKGRFTISRDNAKNTVYLQMNSLKPEDTAVYYCAAGAYGKVPYADALRYWGQGTQVTVSS

SEQ ID NO: 42168 - protein, 117 aa, Artificial Sequence
  Chemically Synthesized
QVQLQESGGGLVQAGGSLRLSCAASGYFWLHSMGWYRQAPGKEREFVATIAYGGNTNYADSVKGRFTISRDNAKNTVYLQMNSLKPEDTAVYYCAAYFSGTTVFTYWGQGTQVTVSS

SEQ ID NO: 42169 - protein, 113 aa, Artificial Sequence
  Chemically Synthesized
QVQLQESGGGLVQAGGSLRLSCAASGSIFYNFYMGWYRQAPGKERELVAGIDNGGSTYYADSVKGRFTISRDNAKNTVYLQMNSLKPEDTAVYYCAVDHHWYWGQGTQVTVSS

SEQ ID NO: 42170 - protein, 112 aa, Artificial Sequence
  Chemically Synthesized
QVQLQESGGGLVQAGGSLRLSCAASGSIFDDYRMGWYRQAPGKEREFVLLPYADSVKGRFTISRDNAKNTVYLQMNSLKPEDTAVYYCAVAFDYYPYRYQYWGQGTQVTVSS

SEQ ID NO: 42171 - protein, 118 aa, Artificial Sequence
  Chemically Synthesized
QVQLQESGGGLVQAGGSLRLSCAASGNISYIVYMGWYRQAPGKEREFVAAIGYGGTTYYADSVKGRFTISRDNAKNTVYLQMNSLKPEDTAVYYCAVEYWLTYKHDYWGQGTQVTVSS

SEQ ID NO: 42172 - protein, 118 aa, Artificial Sequence
  Chemically Synthesized
QVQLQESGGGLVQAGGSLRLSCAASGTISGYYIMGWYRQAPGKERELVAAITYGASTNYADSVKGRFTISRDNAKNTVYLQMNSLKPEDTAVYYCAVWDSGDDYHGYWGQGTQVTVSS

SEQ ID NO: 42173 - protein, 118 aa, Artificial Sequence
  Chemically Synthesized
QVQLQESGGGLVQAGGSLRLSCAASGNISYYQTMGWYRQAPGKERELVAAIADGGTTYYADSVKGRFTISRDNAKNTVYLQMNSLKPEDTAVYYCAVLSIRDEYHIYWGQGTQVTVSS

SEQ ID NO: 42174 - protein, 126 aa, Artificial Sequence
  Chemically Synthesized
QVQLQESGGGLVQAGGSLRLSCAASGYISRYHFMGWYRQAPGKEREFVAGITEGATTYYADSVKGRFTISRDNAKNTVYLQMNSLKPEDTAVYYCAVQEGDGDDYYTYYAHGYYYWGQGTQVTVSS

SEQ ID NO: 42175 - protein, 118 aa, Artificial Sequence
  Chemically Synthesized
QVQLQESGGGLVQAGGSLRLSCAASGTIFTRPTMGWYRQAPGKEREFVAAIASGSSTYYADSVKGRFTISRDNAKNTVYLQMNSLKPEDTAVYYCAARLGYWRSHWYWGQGTQVTVSS

SEQ ID NO: 42176 - protein, 124 aa, Artificial Sequence
  Chemically Synthesized
QVQLQESGGGLVQAGGSLRLSCAASGNIFTDQRMGWYRQAPGKEREFVASIGYGATTYYADSVKGRFTISRDNAKNTVYLQMNSLKPEDTAVYYCAVDTLRSDLLRCSVPVSYWGQGTQVTVSS

SEQ ID NO: 42177 - protein, 118 aa, Artificial Sequence
  Chemically Synthesized
QVQLQESGGGLVQAGGSLRLSCAASGYIFRPYDMGWYRQAPGKEREFVASITKGGTTNYADSVKGRFTISRDNAKNTVYLQMNSLKPEDTAVYYCAAKFRNRFRYYYWGQGTQVTVSS

SEQ ID NO: 42178 - protein, 108 aa, Artificial Sequence
  Chemically Synthesized
QVQLQESGGGLVQAGGSLRLSCAASGSIFQLYDMGWYRQAPGKERELVASITSVVIPYADSVKGRFTISRDNAKNTVYLQMNSLKPEDTAVYYCAYYWGQGTQVTVSS

SEQ ID NO: 42179 - protein, 122 aa, Artificial Sequence
  Chemically Synthesized
QVQLQESGGGLVQAGGSLRLSCAASGTIFGRFGMGWYRQAPGKEREFVAGIAAGGSTYYADSVKGRFTISRDNAKNTVYLQMNSLKPEDTAVYYCAAAAADYYWAGDRFPYWGQGTQVTVSS

SEQ ID NO: 42180 - protein, 118 aa, Artificial Sequence
  Chemically Synthesized
QVQLQESGGGLVQAGGSLRLSCAASGSIFWDYLMGWYRQAPGKEREFVASIASGASTNYADSVKGRFTISRDNAKNTVYLQMNSLKPEDTAVYYCAADSYDSVVFVYWGQGTQVTVSS

SEQ ID NO: 42181 - protein, 117 aa, Artificial Sequence
  Chemically Synthesized
QVQLQESGGGLVQAGGSLRLSCAASGSISGPTKMGWYRQAPGKEREFVAAIDYGASTNYADSVKGRFTISRDNAKNTVYLQMNSLKPEDTAVYYCAAVFYDYPSFYWGQGTQVTVSS

SEQ ID NO: 42182 - protein, 126 aa, Artificial Sequence
  Chemically Synthesized
QVQLQESGGGLVQAGGSLRLSCAASGTIFRDWDMGWYRQAPGKEREFVAAISGGSTTYYADSVKGRFTISRDNAKNTVYLQMNSLKPEDTAVYYCAVNYTVWLFYGLADSGLLGYWGQGTQVTVSS

SEQ ID NO: 42183 - protein, 115 aa, Artificial Sequence
  Chemically Synthesized
QVQLQESGGGLVQAGGSLRLSCAASGTIFWSSDMGWYRQAPGKERELVATITWGSSYADSVKGRFTISRDNAKNTVYLQMNSLKPEDTAVYYCAAGGTDLSVIYWGQGTQVTVSS

SEQ ID NO: 42184 - protein, 118 aa, Artificial Sequence
  Chemically Synthesized
QVQLQESGGGLVQAGGSLRLSCAASGNIFGVPYMGWYRQAPGKERELVASIATGGTTTYYADSVKGRFTISRDNAKNTVYLQMNSLKPEDTAVYYCAARCTTSTVFYWGQGTQVTVSS

SEQ ID NO: 42185 - protein, 126 aa, Artificial Sequence
  Chemically Synthesized
QVQLQESGGGLVQAGGSLRLSCAASGNIFLSIQMGWYRQAPGKEREFVASIGSGSITNYADSVKGRFTISRDNAKNTVYLQMNSLKPEDTAVYYCAVYASDGQVWDVSAPWGHSYWGQGTQVTVSS

SEQ ID NO: 42186 - protein, 121 aa, Artificial Sequence
  Chemically Synthesized
QVQLQESGGGLVQAGGSLRLSCAASGTISDAYIMGWYRQAPGKERELAGIDKGGSTNYADSVKGRFTISRDNAKNTVYLQMNSLKPEDTAVYYCAVQQIINPWDQQVFYYWGQGTQVTVSS

SEQ ID NO: 42187 - protein, 118 aa, Artificial Sequence
  Chemically Synthesized
QVQLQESGGGLVQAGGSLRLSCAASGSIFNPHPMGWYRQAPGKERELVATISYGANTYYADSVKGRFTISRDNAKNTVYLQMNSLKPEDTAVYYCAVYYPYLYYYIYWGQGTQVTVSS

SEQ ID NO: 42188 - protein, 118 aa, Artificial Sequence
  Chemically Synthesized
QVQLQESGGGLVQAGGSLRLSCAASGYISVAARMGWYRQAPGKEREFVAGIDYGANTNYADSVKGRFTISRDNAKNTVYLQMNSLKPEDTAVYYCAASYGHYGLHDYWGQGTQVTVSS

SEQ ID NO: 42189 - protein, 125 aa, Artificial Sequence
  Chemically Synthesized
QVQLQESGGGLVQAGGSLRLSCAASGTIFGNSMGWYRQAPGKERELVAGITYGATTYYADSVKGRFTISRDNAKNTVYLQMNSLKPEDTAVYYCAVDVNTYGSWADVATRWHYYWGQGTQVTVSS

SEQ ID NO: 42190 - protein, 122 aa, Artificial Sequence
  Chemically Synthesized
QVQLQESGGGLVQAGGSLRLSCAASGYISAGLYMGWYRQAPGKERELVASITDGGNTYYADSVKGRFTISRDNAKNTVYLQMNSLKPEDTAVYYCAAYWYYTWLSRRYHAYWGQGTQVTVSS

SEQ ID NO: 42191 - protein, 118 aa, Artificial Sequence
  Chemically Synthesized
QVQLQESGGGLVQAGGSLRLSCAASGSISDGLGMGWYRQAPGKEREFVASIGYGATTYYADSVKGRFTISRDNAKNTVYLQMNSLKPEDTAVYYCAADDDDHLGHNYWGQGTQVTVSS

SEQ ID NO: 42192 - protein, 118 aa, Artificial Sequence
  Chemically Synthesized
QVQLQESGGGLVQAGGSLRLSCAASGNIFPFYLMGWYRQAPGKERELVASISSGGNTYYADSVKGRFTISRDNAKNTVYLQMNSLKPEDTAVYYCAAVSPLGYYFRYWGQGTQVTVSS

SEQ ID NO: 42193 - protein, 122 aa, Artificial Sequence
  Chemically Synthesized
QVQLQESGGGLVQAGGSLRLSCAASGTISAAVTMGWYRQAPGKEREFVAAISVGSSTNYADSVKGRFTISRDNAKNTVYLQMNSLKPEDTAVYYCAVGVDPPDLNDWYYYYWGQGTQVTVSS

SEQ ID NO: 42194 - protein, 122 aa, Artificial Sequence
  Chemically Synthesized
QVQLQESGGGLVQAGGSLRLSCAASGSISKFHYMGWYRQAPGKERELVATIGRGSTTNYADSVKGRFTISRDNAKNTVYLQMNSLKPEDTAVYYCAVESTDVGYTADSYHYWGQGTQVTVSS

SEQ ID NO: 42195 - protein, 126 aa, Artificial Sequence
  Chemically Synthesized
QVQLQESGGGLVQAGGSLRLSCAASGTISWSDIMGWYRQAPGKERELVATIAIGGTTYYADSVKGRFTISRDNAKNTVYLQMNSLKPEDTAVYYCAVDDLDLHHTDRYNFAALYYWGQGTQVTVSS

SEQ ID NO: 42196 - protein, 118 aa, Artificial Sequence
  Chemically Synthesized
QVQLQESGGGLVQAGGSLRLSCAASGSISTDSDMGWYRQAPGKEREFVAAIDYGSNTYYADSVKGRFTISRDNAKNTVYLQMNSLKPEDTAVYYCAATSTWGYRHEYWGQGTQVTVSS

SEQ ID NO: 42197 - protein, 122 aa, Artificial Sequence
  Chemically Synthesized
QVQLQESGGGLVQAGGSLRLSCAASGNISDYRGMGWYRQAPGKEREFVATIDPGTNTYYADSVKGRFTISRDNAKNTVYLQMNSLKPEDTAVYYCAAIGPQSGDFVEWFDYWGQGTQVTVSS

SEQ ID NO: 42198 - protein, 120 aa, Artificial Sequence
  Chemically Synthesized
QVQLQESGGGLVQAGGSLRLSCAASGNIFTNGDMGWYRQAPGKEREFVATINEGGSTYADSVKGRFTISRDNAKNTVYLQMNSLKPEDTAVYYCAVDFSLGIRRVVTFYWGQGTQVTVSS

SEQ ID NO: 42199 - protein, 126 aa, Artificial Sequence
  Chemically Synthesized
QVQLQESGGGLVQAGGSLRLSCAASGYISWYASMGWYRQAPGKERELVAAITDGANTYYADSVKGRFTISRDNAKNTVYLQMNSLKPEDTAVYYCAVDGNSRYYRHGAHQESHQYWGQGTQVTVSS

SEQ ID NO: 42200 - protein, 126 aa, Artificial Sequence
  Chemically Synthesized
QVQLQESGGGLVQAGGSLRLSCAASGSISASGDMGWYRQAPGKEREFVAGISPGGITNYADSVKGRFTISRDNAKNTVYLQMNSLKPEDTAVYYCAADDTDGATSLLLPDPGLSYWGQGTQVTVSS

SEQ ID NO: 42201 - protein, 116 aa, Artificial Sequence
  Chemically Synthesized
QVQLQESGGGLVQAGGSLRLSCAASGNISWPSVMGWYRQAPGKERELVAAIDGGTITYYADSVKGRFTISRDNAKNTVYLQMNSLKPEDTAVYYCAAYYPDTHTYWGQGTQVTVSS

SEQ ID NO: 42202 - protein, 117 aa, Artificial Sequence
  Chemically Synthesized
QVQLQESGGGLVQAGGSLRLSCAASGTISVYDYMGWYRQAPGKEREFVATINFGATTNYADSVKGRFTISRDNAKNTVYLQMNSLKPEDTAVYYCAVYDSVPSVMYWGQGTQVTVSS

SEQ ID NO: 42203 - protein, 118 aa, Artificial Sequence
  Chemically Synthesized
QVQLQESGGGLVQAGGSLRLSCAASGNIFSAHIMGWYRQAPGKERELVATIGYGSTTYYADSVKGRFTISRDNAKNTVYLQMNSLKPEDTAVYYCAVDAPFYGYHYYWGQGTQVTVSS

SEQ ID NO: 42204 - protein, 126 aa, Artificial Sequence
  Chemically Synthesized
QVQLQESGGGLVQAGGSLRLSCAASGNIFQGHRMGWYRQAPGKERELVAAISAGATTNYADSVKGRFTISRDNAKNTVYLQMNSLKPEDTAVYYCAAGVPQVDYPPYTGPDTYAYWGQGTQVTVSS

SEQ ID NO: 42205 - protein, 118 aa, Artificial Sequence
  Chemically Synthesized
QVQLQESGGGLVQAGGSLRLSCAASGSISDNYIMGWYRQAPGKERELVAAITHGASTYYADSVKGRFTISRDNAKNTVYLQMNSLKPEDTAVYYCAVQYLTVIWHYYWGQGTQVTVSS

SEQ ID NO: 42206 - protein, 117 aa, Artificial Sequence
  Chemically Synthesized
QVQLQESGGGLVQAGGSLRLSCAASGIFLLTLMGWYRQAPGKEREFVAAISDGGNTYYADSVKGRFTISRDNAKNTVYLQMNSLKPEDTAVYYCAAGLYGYSSFIYWGQGTQVTVSS

SEQ ID NO: 42207 - protein, 126 aa, Artificial Sequence
  Chemically Synthesized
QVQLQESGGGLVQAGGSLRLSCAASGNISSGFVMGWYRQAPGKERELVATISYGTITNYADSVKGRFTISRDNAKNTVYLQMNSLKPEDTAVYYCAANGRADTLPYLWYWFYYPYWGQGTQVTVSS

SEQ ID NO: 42208 - protein, 122 aa, Artificial Sequence
  Chemically Synthesized
QVQLQESGGGLVQAGGSLRLSCAASGNISGYDDMGWYRQAPGKEREFVAAIGYGANTYYADSVKGRFTISRDNAKNTVYLQMNSLKPEDTAVYYCAAYGSYRAYRYAYHAYWGQGTQVTVSS

SEQ ID NO: 42209 - protein, 122 aa, Artificial Sequence
  Chemically Synthesized
QVQLQESGGGLVQAGGSLRLSCAASGTISYPTVMGWYRQAPGKEREFVAGIDDGGSTYYADSVKGRFTISRDNAKNTVYLQMNSLKPEDTAVYYCAAYDVVYAWSYLQHDYWGQGTQVTVSS

SEQ ID NO: 42210 - protein, 126 aa, Artificial Sequence
  Chemically Synthesized
QVQLQESGGGLVQAGGSLRLSCAASGSISLYTLMGWYRQAPGKERELVAAITLGTTTYYADSVKGRFTISRDNAKNTVYLQMNSLKPEDTAVYYCAALLPNDRDAGVPARVGHGYWGQGTQVTVSS

SEQ ID NO: 42211 - protein, 122 aa, Artificial Sequence
  Chemically Synthesized
QVQLQESGGGLVQAGGSLRLSCAASGNISWYYHMGWYRQAPGKERELVATIAYGTITYYADSVKGRFTISRDNAKNTVYLQMNSLKPEDTAVYYCAATRYYYWGQVNRLSYWGQGTQVTVSS

SEQ ID NO: 42212 - protein, 118 aa, Artificial Sequence
  Chemically Synthesized
QVQLQESGGGLVQAGGSLRLSCAASGTIFDELVMGWYRQAPGKEREFVAGINVGGNTYYADSVKGRFTISRDNAKNTVYLQMNSLKPEDTAVYYCAALRSGRYPFYYWGQGTQVTVSS

SEQ ID NO: 42213 - protein, 118 aa, Artificial Sequence
  Chemically Synthesized
QVQLQESGGGLVQAGGSLRLSCAASGSISTRVAMGWYRQAPGKERELVAAITSGATTYYADSVKGRFTISRDNAKNTVYLQMNSLKPEDTAVYYCAVWIRGGASHSYWGQGTQVTVSS

SEQ ID NO: 42214 - protein, 118 aa, Artificial Sequence
  Chemically Synthesized
QVQLQESGGGLVQAGGSLRLSCAASGSISEYLQMGWYRQAPGKERELVASINDGANTYYADSVKGRFTISRDNAKNTVYLQMNSLKPEDTAVYYCAAEQPYWKWLAYWGQGTQVTVSS

SEQ ID NO: 42215 - protein, 126 aa, Artificial Sequence
  Chemically Synthesized
QVQLQESGGGLVQAGGSLRLSCAASGTISGYAYMGWYRQAPGKERELVAGISYGTNTYYADSVKGRFTISRDNAKNTVYLQMNSLKPEDTAVYYCAVIYRVRAQQGSQDDRDHVYWGQGTQVTVSS

SEQ ID NO: 42216 - protein, 118 aa, Artificial Sequence
  Chemically Synthesized
QVQLQESGGGLVQAGGSLRLSCAASGSISYDELMGWYRQAPGKERELVATITWGASTYYADSVKGRFTISRDNAKNTVYLQMNSLKPEDTAVYYCAATYRYGASHLYWGQGTQVTVSS

SEQ ID NO: 42217 - protein, 121 aa, Artificial Sequence
  Chemically Synthesized
QVQLQESGGGLVQAGGSLRLSCAASGTIFTDFPMGWYRQAPGKERELVASINYGSSTNYADSVKGRFTISRDNAKNTVYLQMNSLKPEDTAVYYCAAKSGYVTSVSLTFYWGQGTQVTVSS

SEQ ID NO: 42218 - protein, 121 aa, Artificial Sequence
  Chemically Synthesized
QVQLQESGGGLVQAGGSLRLSCAASGTISQTFEMGWYRQAPGKERELVASIGYGTITNYADSVKGRFTISRDNAKNTVYLQMNSLKPEDTAVYYCAVQPVPFSSSLTTIYWGQGTQVTVSS

SEQ ID NO: 42219 - protein, 116 aa, Artificial Sequence
  Chemically Synthesized
QVQLQESGGGLVQAGGSLRLSCAASGNIFDTVMGWYRQAPGKEREFVASIGYGASTNYADSVKGRFTISRDNAKNTVYLQMNSLKPEDTAVYYCAADVNWDAYHYWGQGTQVTVSS

SEQ ID NO: 42220 - protein, 122 aa, Artificial Sequence
  Chemically Synthesized
QVQLQESGGGLVQAGGSLRLSCAASGNISGSDYMGWYRQAPGKEREFVATIGYGATTYYADSVKGRFTISRDNAKNTVYLQMNSLKPEDTAVYYCAAGWYLTSLRNYPHYYWGQGTQVTVSS

SEQ ID NO: 42221 - protein, 126 aa, Artificial Sequence
  Chemically Synthesized
QVQLQESGGGLVQAGGSLRLSCAASGNIFTYFYMGWYRQAPGKERELVATISYGGSTYYADSVKGRFTISRDNAKNTVYLQMNSLKPEDTAVYYCAVDTYWTDYLYIILGTGHWYWGQGTQVTVSS

SEQ ID NO: 42222 - protein, 126 aa, Artificial Sequence
  Chemically Synthesized
QVQLQESGGGLVQAGGSLRLSCAASGNIFAGQTMGWYRQAPGKERELVATIAYGSNTNYADSVKGRFTISRDNAKNTVYLQMNSLKPEDTAVYYCAAVDGQGQYTYGKPHYFHWYWGQGTQVTVSS

SEQ ID NO: 42223 - protein, 120 aa, Artificial Sequence
  Chemically Synthesized
QVQLQESGGGLVQAGGSLRLSCAASGTIFPYMGWYRQAPGKERELVASIGPGTSTYYADSVKGRFTISRDNAKNTVYLQMNSLKPEDTAVYYCAAYPYLLYYFAGYHWYWGQGTQVTVSS

SEQ ID NO: 42224 - protein, 113 aa, Artificial Sequence
  Chemically Synthesized
QVQLQESGGGLVQAGGSLRLSCAASGTISIRSVMGWYRQAPGKERELVAGIGQGSKYQYADSVKGRFTISRDNAKNTVYLQMNSLKPEDTAVYYCAVDLLDYWGQGTQVTVSS

SEQ ID NO: 42225 - protein, 118 aa, Artificial Sequence
  Chemically Synthesized
QVQLQESGGGLVQAGGSLRLSCAASGSISPPSWMGWYRQAPGKEREFVAGIDHGATTYYADSVKGRFTISRDNAKNTVYLQMNSLKPEDTAVYYCAAPLDQDDDLSYWGQGTQVTVSS

SEQ ID NO: 42226 - protein, 118 aa, Artificial Sequence
  Chemically Synthesized
QVQLQESGGGLVQAGGSLRLSCAASGTIFYRGRMGWYRQAPGKEREFVAGITAGGTTYYADSVKGRFTISRDNAKNTVYLQMNSLKPEDTAVYYCAVGRARVWRLGYWGQGTQVTVSS

SEQ ID NO: 42227 - protein, 123 aa, Artificial Sequence
  Chemically Synthesized
QVQLQESGGGLVQAGGSLRLSCAASGYISASDRMGWYRQAPGKEREFVVVVVLVPYADSVKGRFTISRDNAKNTVYLQMNSLKPEDTAVYYCAVDSNYDYINYDYTAWPYGYWGQGTQVTVSS

SEQ ID NO: 42228 - protein, 122 aa, Artificial Sequence
  Chemically Synthesized
QVQLQESGGGLVQAGGSLRLSCAASGSISDTTYMGWYRQAPGKERELVATIAHGATTYYADSVKGRFTISRDNAKNTVYLQMNSLKPEDTAVYYCAAWQTWPGLPRGVHLYWGQGTQVTVSS

SEQ ID NO: 42229 - protein, 121 aa, Artificial Sequence
  Chemically Synthesized
QVQLQESGGGLVQAGGSLRLSCAASGNISHRHRMGWYRQAPGKERELVAAITFGSITNYADSVKGRFTISRDNAKNTVYLQMNSLKPEDTAVYYCAAYGRKYYGRYYYQYWGQGTQVTVSS

SEQ ID NO: 42230 - protein, 122 aa, Artificial Sequence
  Chemically Synthesized
QVQLQESGGGLVQAGGSLRLSCAASGSIFRWLVMGWYRQAPGKEREFVASIAYGTNTYYADSVKGRFTISRDNAKNTVYLQMNSLKPEDTAVYYCAAWYAFFGAYPVRLEYWGQGTQVTVSS

SEQ ID NO: 42231 - protein, 126 aa, Artificial Sequence
  Chemically Synthesized
QVQLQESGGGLVQAGGSLRLSCAASGYISFSARMGWYRQAPGKEREFVASISTGTNTYYADSVKGRFTISRDNAKNTVYLQMNSLKPEDTAVYYCAAYTWPNRTTYILQVPRLTYWGQGTQVTVSS

SEQ ID NO: 42232 - protein, 117 aa, Artificial Sequence
  Chemically Synthesized
QVQLQESGGGLVQAGGSLRLSCAASGSIFHTGMGWYRQAPGKEREFVATISQGTSTYYADSVKGRFTISRDNAKNTVYLQMNSLKPEDTAVYYCAASIGEDPDHVYWGQGTQVTVSS

SEQ ID NO: 42233 - protein, 117 aa, Artificial Sequence
  Chemically Synthesized
QVQLQESGGGLVQAGGSLRLSCAASGSISLSYSMGWYRQAPGKERELVAAISDGATTYYADSVKGRFTISRDNAKNTVYLQMNSLKPEDTAVYYCAVVADISYSMYWGQGTQVTVSS

SEQ ID NO: 42234 - protein, 120 aa, Artificial Sequence
  Chemically Synthesized
QVQLQESGGGLVQAGGSLRLSCAASGCMGWYRQAPGKERELVATISYGASTNYADSVKGRFTISRDNAKNTVYLQMNSLKPEDTAVYYCAADYADDTWEYYYQYWPFPYWGQGTQVTVSS

SEQ ID NO: 42235 - protein, 122 aa, Artificial Sequence
  Chemically Synthesized
QVQLQESGGGLVQAGGSLRLSCAASGYISRAYYMGWYRQAPGKERELVAGITIGANTNYADSVKGRFTISRDNAKNTVYLQMNSLKPEDTAVYYCAARGNDLYNLYIDLAYWGQGTQVTVSS

SEQ ID NO: 42236 - protein, 122 aa, Artificial Sequence
  Chemically Synthesized
QVQLQESGGGLVQAGGSLRLSCAASGNISNRYYMGWYRQAPGKERELVATIASGATTYYADSVKGRFTISRDNAKNTVYLQMNSLKPEDTAVYYCAAYDAIKDYFYKAHDYWGQGTQVTVSS

SEQ ID NO: 42237 - protein, 118 aa, Artificial Sequence
  Chemically Synthesized
QVQLQESGGGLVQAGGSLRLSCAASGYISGRYTMGWYRQAPGKEREFVASITTGSNTNYADSVKGRFTISRDNAKNTVYLQMNSLKPEDTAVYYCAAKYYWTYYHRYWGQGTQVTVSS

SEQ ID NO: 42238 - protein, 117 aa, Artificial Sequence
  Chemically Synthesized
QVQLQESGGGLVQAGGSLRLSCAASGSISDVTLMGWYRQAPGKEREFVAAIGPGASTYYADSVKGRFTISRDNAKNTVYLQMNSLKPEDTAVYYCAVDGPDNDLTYWGQGTQVTVSS

SEQ ID NO: 42239 - protein, 126 aa, Artificial Sequence
  Chemically Synthesized
QVQLQESGGGLVQAGGSLRLSCAASGNISPAIDMGWYRQAPGKERELVATINYGTSTNYADSVKGRFTISRDNAKNTVYLQMNSLKPEDTAVYYCAVGSAYDHYHVYFHVNDYWYWGQGTQVTVSS

SEQ ID NO: 42240 - protein, 126 aa, Artificial Sequence
  Chemically Synthesized
QVQLQESGGGLVQAGGSLRLSCAASGTISDHIWMGWYRQAPGKEREFVASIGVGGTTNYADSVKGRFTISRDNAKNTVYLQMNSLKPEDTAVYYCAAHPRDDDVNTPSEYYIHGYWGQGTQVTVSS

SEQ ID NO: 42241 - protein, 122 aa, Artificial Sequence
  Chemically Synthesized
QVQLQESGGGLVQAGGSLRLSCAASGSISILFIMGWYRQAPGKERELVATITTGTTTNYADSVKGRFTISRDNAKNTVYLQMNSLKPEDTAVYYCAARYPESIYQAISHVYWGQGTQVTVSS

SEQ ID NO: 42242 - protein, 118 aa, Artificial Sequence
  Chemically Synthesized
QVQLQESGGGLVQAGGSLRLSCAASGSISITAIMGWYRQAPGKEREFVATISYGGSTNYADSVKGRFTISRDNAKNTVYLQMNSLKPEDTAVYYCAVYYRKAGVHTYWGQGTQVTVSS

SEQ ID NO: 42243 - protein, 122 aa, Artificial Sequence
  Chemically Synthesized
QVQLQESGGGLVQAGGSLRLSCAASGYISGRVLMGWYRQAPGKEREFVATIDYGGSTYYADSVKGRFTISRDNAKNTVYLQMNSLKPEDTAVYYCAVAYVDPFYYRGWHWYWGQGTQVTVSS

SEQ ID NO: 42244 - protein, 118 aa, Artificial Sequence
  Chemically Synthesized
QVQLQESGGGLVQAGGSLRLSCAASGNISDIPAMGWYRQAPGKERELVAGIDAGTNTYYADSVKGRFTISRDNAKNTVYLQMNSLKPEDTAVYYCAVGVAVWDGHSYWGQGTQVTVSS

SEQ ID NO: 42245 - protein, 118 aa, Artificial Sequence
  Chemically Synthesized
QVQLQESGGGLVQAGGSLRLSCAASGNIFYYYYMGWYRQAPGKEREFVASIDAGGSTNYADSVKGRFTISRDNAKNTVYLQMNSLKPEDTAVYYCAVVYRPPRYLVYWGQGTQVTVSS

SEQ ID NO: 42246 - protein, 122 aa, Artificial Sequence
  Chemically Synthesized
QVQLQESGGGLVQAGGSLRLSCAASGTISYLWGMGWYRQAPGKEREFVASIGFGATTNYADSVKGRFTISRDNAKNTVYLQMNSLKPEDTAVYYCAVVWALYVTSRKDLPYWGQGTQVTVSS

SEQ ID NO: 42247 - protein, 126 aa, Artificial Sequence
  Chemically Synthesized
QVQLQESGGGLVQAGGSLRLSCAASGTISTYTLMGWYRQAPGKERELVATIGQGSTTYYADSVKGRFTISRDNAKNTVYLQMNSLKPEDTAVYYCAALYWPYLYDLDARYPLYDYWGQGTQVTVSS

SEQ ID NO: 42248 - protein, 118 aa, Artificial Sequence
  Chemically Synthesized
QVQLQESGGGLVQAGGSLRLSCAASGTISSFDSMGWYRQAPGKEREFVATINRGASTNYADSVKGRFTISRDNAKNTVYLQMNSLKPEDTAVYYCAASPRGYEHHDYWGQGTQVTVSS

SEQ ID NO: 42249 - protein, 126 aa, Artificial Sequence
  Chemically Synthesized
QVQLQESGGGLVQAGGSLRLSCAASGSISYGPSMGWYRQAPGKERELVASIAGGSNTYYADSVKGRFTISRDNAKNTVYLQMNSLKPEDTAVYYCAAYYDDIYGLQNDGSYQLPYWGQGTQVTVSS

SEQ ID NO: 42250 - protein, 118 aa, Artificial Sequence
  Chemically Synthesized
QVQLQESGGGLVQAGGSLRLSCAASGTIFYKPLMGWYRQAPGKEREFVAAINYGTTTNYADSVKGRFTISRDNAKNTVYLQMNSLKPEDTAVYYCAAYRRRYPPFPYWGQGTQVTVSS

SEQ ID NO: 42251 - protein, 118 aa, Artificial Sequence
  Chemically Synthesized
QVQLQESGGGLVQAGGSLRLSCAASGSIFYLWTMGWYRQAPGKERELVATIGVGSNTYYADSVKGRFTISRDNAKNTVYLQMNSLKPEDTAVYYCAVDERPQYAFYYWGQGTQVTVSS

SEQ ID NO: 42252 - protein, 118 aa, Artificial Sequence
  Chemically Synthesized
QVQLQESGGGLVQAGGSLRLSCAASGYIFYQHYMGWYRQAPGKERELVATIGYGASTYYADSVKGRFTISRDNAKNTVYLQMNSLKPEDTAVYYCAVHVVRRSYHPYWGQGTQVTVSS

SEQ ID NO: 42253 - protein, 118 aa, Artificial Sequence
  Chemically Synthesized
QVQLQESGGGLVQAGGSLRLSCAASGSIFSPRYMGWYRQAPGKERELVATINVGGITYYADSVKGRFTISRDNAKNTVYLQMNSLKPEDTAVYYCAADVSYRWPFGYWGQGTQVTVSS

SEQ ID NO: 42254 - protein, 118 aa, Artificial Sequence
  Chemically Synthesized
QVQLQESGGGLVQAGGSLRLSCAASGYIFTVYDMGWYRQAPGKERELVAGITSGGTTYYADSVKGRFTISRDNAKNTVYLQMNSLKPEDTAVYYCAAYNVYLRYLWYWGQGTQVTVSS

SEQ ID NO: 42255 - protein, 118 aa, Artificial Sequence
  Chemically Synthesized
QVQLQESGGGLVQAGGSLRLSCAASGTISSIFKMGWYRQAPGKERELVATIGGGANTNYADSVKGRFTISRDNAKNTVYLQMNSLKPEDTAVYYCAADDYGARYYDYWGQGTQVTVSS

SEQ ID NO: 42256 - protein, 118 aa, Artificial Sequence
  Chemically Synthesized
QVQLQESGGGLVQAGGSLRLSCAASGSIFRGPSMGWYRQAPGKERELVASIGPGGNTYYADSVKGRFTISRDNAKNTVYLQMNSLKPEDTAVYYCAVATSPPYRYLYWGQGTQVTVSS

SEQ ID NO: 42257 - protein, 122 aa, Artificial Sequence
  Chemically Synthesized
QVQLQESGGGLVQAGGSLRLSCAASGTIFYDWVMGWYRQAPGKEREFVAAIDYGGSTYYADSVKGRFTISRDNAKNTVYLQMNSLKPEDTAVYYCAAGTQRVPQYVYYLVYWGQGTQVTVSS

SEQ ID NO: 42258 - protein, 121 aa, Artificial Sequence
  Chemically Synthesized
QVQLQESGGGLVQAGGSLRLSCAASGYIFGGRGMGWYRQAPGKEREFVASINYGTNTNYADSVKGRFTISRDNAKNTVYLQMNSLKPEDTAVYYCAVFYYYSFYGRWYYYWGQGTQVTVSS

SEQ ID NO: 42259 - protein, 117 aa, Artificial Sequence
  Chemically Synthesized
QVQLQESGGGLVQAGGSLRLSCAASGSISSASMGWYRQAPGKEREFVATINEGATTYYADSVKGRFTISRDNAKNTVYLQMNSLKPEDTAVYYCAAGSVEALYLRYWGQGTQVTVSS

SEQ ID NO: 42260 - protein, 126 aa, Artificial Sequence
  Chemically Synthesized
QVQLQESGGGLVQAGGSLRLSCAASGYISQDFNMGWYRQAPGKERELVAAIDYGATTNYADSVKGRFTISRDNAKNTVYLQMNSLKPEDTAVYYCAVSIWDRSSVWWLSYTYFQYWGQGTQVTVSS

SEQ ID NO: 42261 - protein, 117 aa, Artificial Sequence
  Chemically Synthesized
QVQLQESGGGLVQAGGSLRLSCAASGTIFRTFYMGWYRQAPGKERELVAGIGYGGTTNYADSVKGRFTISRDNAKNTVYLQMNSLKPEDTAVYYCAVYYDVSLHFYWGQGTQVTVSS

SEQ ID NO: 42262 - protein, 118 aa, Artificial Sequence
  Chemically Synthesized
QVQLQESGGGLVQAGGSLRLSCAASGSIFIIGTMGWYRQAPGKEREFVAGIGQGTTTNYADSVKGRFTISRDNAKNTVYLQMNSLKPEDTAVYYCAVTTGSWSAHHYWGQGTQVTVSS

SEQ ID NO: 42263 - protein, 118 aa, Artificial Sequence
  Chemically Synthesized
QVQLQESGGGLVQAGGSLRLSCAASGNIFYPYIMGWYRQAPGKEREFVATINDGAITYYADSVKGRFTISRDNAKNTVYLQMNSLKPEDTAVYYCAAATTGTFALYYWGQGTQVTVSS

SEQ ID NO: 42264 - protein, 118 aa, Artificial Sequence
  Chemically Synthesized
QVQLQESGGGLVQAGGSLRLSCAASGNIFQPDVMGWYRQAPGKERELVAGIALGGTTYYADSVKGRFTISRDNAKNTVYLQMNSLKPEDTAVYYCAAYATLRQDLPYWGQGTQVTVSS

SEQ ID NO: 42265 - protein, 118 aa, Artificial Sequence
  Chemically Synthesized
QVQLQESGGGLVQAGGSLRLSCAASGSISYEWLMGWYRQAPGKEREFVATITTGAITNYADSVKGRFTISRDNAKNTVYLQMNSLKPEDTAVYYCAAYPGYSWVHRYWGQGTQVTVSS

SEQ ID NO: 42266 - protein, 126 aa, Artificial Sequence
  Chemically Synthesized
QVQLQESGGGLVQAGGSLRLSCAASGYISYLHGMGWYRQAPGKEREFVASINSGATTYYADSVKGRFTISRDNAKNTVYLQMNSLKPEDTAVYYCAAGLGLIGQYLYKYLSFLGYWGQGTQVTVSS

SEQ ID NO: 42267 - protein, 118 aa, Artificial Sequence
  Chemically Synthesized
QVQLQESGGGLVQAGGSLRLSCAASGYISSGYSMGWYRQAPGKERELVAGISRGSTTNYADSVKGRFTISRDNAKNTVYLQMNSLKPEDTAVYYCAALTYTDPYLLYWGQGTQVTVSS

SEQ ID NO: 42268 - protein, 118 aa, Artificial Sequence
  Chemically Synthesized
QVQLQESGGGLVQAGGSLRLSCAASGTISWTYTMGWYRQAPGKERELVASIAGGSTTYYADSVKGRFTISRDNAKNTVYLQMNSLKPEDTAVYYCAADTADNSRYIYWGQGTQVTVSS

SEQ ID NO: 42269 - protein, 118 aa, Artificial Sequence
  Chemically Synthesized
QVQLQESGGGLVQAGGSLRLSCAASGNIFGDQYMGWYRQAPGKEREFVAGIDIGGITYYADSVKGRFTISRDNAKNTVYLQMNSLKPEDTAVYYCAVGWRGDDVHYYWGQGTQVTVSS

SEQ ID NO: 42270 - protein, 118 aa, Artificial Sequence
  Chemically Synthesized
QVQLQESGGGLVQAGGSLRLSCAASGSISRGTFMGWYRQAPGKEREFVAGIDDGSNTYYADSVKGRFTISRDNAKNTVYLQMNSLKPEDTAVYYCAADQQRVNGLTYWGQGTQVTVSS

SEQ ID NO: 42271 - protein, 126 aa, Artificial Sequence
  Chemically Synthesized
QVQLQESGGGLVQAGGSLRLSCAASGNISYHRVMGWYRQAPGKERELVASIAYGASTYYADSVKGRFTISRDNAKNTVYLQMNSLKPEDTAVYYCAVQTSTSRYIGDSYAYYFTYWGQGTQVTVSS

SEQ ID NO: 42272 - protein, 118 aa, Artificial Sequence
  Chemically Synthesized
QVQLQESGGGLVQAGGSLRLSCAASGYISPPLYMGWYRQAPGKERELVATIDPGSNTYYADSVKGRFTISRDNAKNTVYLQMNSLKPEDTAVYYCAVERPRAYFHPYWGQGTQVTVSS

SEQ ID NO: 42273 - protein, 127 aa, Artificial Sequence
  Chemically Synthesized
QVQLQESGGGLVQAGGSLRLSCAASGSIFAPLGWMGWYRQAPGKERELVAGIGNGTSTYYADSVKGRFTISRDNAKNTVYLQMNSLKPEDTAVYYCAAGDREPTPSWRPYVSDHNYWGQGTQVTVSS

SEQ ID NO: 42274 - protein, 118 aa, Artificial Sequence
  Chemically Synthesized
QVQLQESGGGLVQAGGSLRLSCAASGTIFEVWYMGWYRQAPGKEREFVAAIDAGGITYYADSVKGRFTISRDNAKNTVYLQMNSLKPEDTAVYYCAVTQYRRYSHGYWGQGTQVTVSS

SEQ ID NO: 42275 - protein, 122 aa, Artificial Sequence
  Chemically Synthesized
QVQLQESGGGLVQAGGSLRLSCAASGYISRRLTMGWYRQAPGKEREFVAGISIGGTTNYADSVKGRFTISRDNAKNTVYLQMNSLKPEDTAVYYCAAGALNQRGKLNYHFYWGQGTQVTVSS

SEQ ID NO: 42276 - protein, 126 aa, Artificial Sequence
  Chemically Synthesized
QVQLQESGGGLVQAGGSLRLSCAASGYIFPYQYMGWYRQAPGKEREFVAAINSGAITYYADSVKGRFTISRDNAKNTVYLQMNSLKPEDTAVYYCAVRGPSVGYTNYWAFVPYDYWGQGTQVTVSS

SEQ ID NO: 42277 - protein, 119 aa, Artificial Sequence
  Chemically Synthesized
QVQLQESGGGLVQAGGSLRLSCAASGTIFDYADMGWYRQAPGKERELVAAISLGLYADSVKGRFTISRDNAKNTVYLQMNSLKPEDTAVYYCAVEYAAGVVYRDRLRYWGQGTQVTVSS

SEQ ID NO: 42278 - protein, 122 aa, Artificial Sequence
  Chemically Synthesized
QVQLQESGGGLVQAGGSLRLSCAASGTISSAYHMGWYRQAPGKEREFVAAISQGGNTYYADSVKGRFTISRDNAKNTVYLQMNSLKPEDTAVYYCAVVGAVSPGRRYPFPYWGQGTQVTVSS

SEQ ID NO: 42279 - protein, 126 aa, Artificial Sequence
  Chemically Synthesized
QVQLQESGGGLVQAGGSLRLSCAASGTISTWGEMGWYRQAPGKEREFVATINYGTITYYADSVKGRFTISRDNAKNTVYLQMNSLKPEDTAVYYCAVVYLYGPNRYAYSYPPHSYWGQGTQVTVSS

SEQ ID NO: 42280 - protein, 122 aa, Artificial Sequence
  Chemically Synthesized
QVQLQESGGGLVQAGGSLRLSCAASGSISTRDFMGWYRQAPGKEREFVASINDGGSTNYADSVKGRFTISRDNAKNTVYLQMNSLKPEDTAVYYCAVPDGLKRQDQADYRYWGQGTQVTVSS

SEQ ID NO: 42281 - protein, 118 aa, Artificial Sequence
  Chemically Synthesized
QVQLQESGGGLVQAGGSLRLSCAASGTIFDGWSMGWYRQAPGKERELVASITYGAITYYADSVKGRFTISRDNAKNTVYLQMNSLKPEDTAVYYCAARDSAYPKYSYWGQGTQVTVSS

SEQ ID NO: 42282 - protein, 122 aa, Artificial Sequence
  Chemically Synthesized
QVQLQESGGGLVQAGGSLRLSCAASGYIFSWGSMGWYRQAPGKERELVASIDAGSITYYADSVKGRFTISRDNAKNTVYLQMNSLKPEDTAVYYCAAHYAYDRGYRAAFPYWGQGTQVTVSS

SEQ ID NO: 42283 - protein, 120 aa, Artificial Sequence
  Chemically Synthesized
QVQLQESGGGLVQAGGSLRLSCAASGYISYNPYMGWYRQAPGKERELVAGIDHGANTYYADSVKGRFTISRDNAKNTVYLQMNSLKPEDTAVYYCAVYGYPDQDWYFTYWGQGTQVTVSS

SEQ ID NO: 42284 - protein, 118 aa, Artificial Sequence
  Chemically Synthesized
QVQLQESGGGLVQAGGSLRLSCAASGNIFGYHIMGWYRQAPGKEREFVATIASGGNTNYADSVKGRFTISRDNAKNTVYLQMNSLKPEDTAVYYCAAWGRGYGRFAYWGQGTQVTVSS

SEQ ID NO: 42285 - protein, 122 aa, Artificial Sequence
  Chemically Synthesized
QVQLQESGGGLVQAGGSLRLSCAASGTISGGSYMGWYRQAPGKEREFVASIDEGTSTYYADSVKGRFTISRDNAKNTVYLQMNSLKPEDTAVYYCAAITGHGDDDDDLHWYWGQGTQVTVSS

SEQ ID NO: 42286 - protein, 118 aa, Artificial Sequence
  Chemically Synthesized
QVQLQESGGGLVQAGGSLRLSCAASGTISGVYGMGWYRQAPGKEREFVAGINTGGTTNYADSVKGRFTISRDNAKNTVYLQMNSLKPEDTAVYYCAANVDPTVWYPYWGQGTQVTVSS

SEQ ID NO: 42287 - protein, 114 aa, Artificial Sequence
  Chemically Synthesized
QVQLQESGGGLVQAGGSLRLSCAASGTISGVRVMGWYRQAPGKERELVAGIGYVLVPYADSVKGRFTISRDNAKNTVYLQMNSLKPEDTAVYYCAAKGYYLDYWGQGTQVTVSS

SEQ ID NO: 42288 - protein, 122 aa, Artificial Sequence
  Chemically Synthesized
QVQLQESGGGLVQAGGSLRLSCAASGSISLQPAMGWYRQAPGKEREFVAGIDPGTSTYYADSVKGRFTISRDNAKNTVYLQMNSLKPEDTAVYYCAVGRDDYNVNEPYLFYWGQGTQVTVSS

SEQ ID NO: 42289 - protein, 126 aa, Artificial Sequence
  Chemically Synthesized
QVQLQESGGGLVQAGGSLRLSCAASGYISSSRFMGWYRQAPGKEREFVAAIGDGTTTNYADSVKGRFTISRDNAKNTVYLQMNSLKPEDTAVYYCAVGSWFGRYYVDYRDRYHDYWGQGTQVTVSS

SEQ ID NO: 42290 - protein, 118 aa, Artificial Sequence
  Chemically Synthesized
QVQLQESGGGLVQAGGSLRLSCAASGYISDSGAMGWYRQAPGKERELVATISYGANTYYADSVKGRFTISRDNAKNTVYLQMNSLKPEDTAVYYCAAVRYAYVGFAYWGQGTQVTVSS

SEQ ID NO: 42291 - protein, 118 aa, Artificial Sequence
  Chemically Synthesized
QVQLQESGGGLVQAGGSLRLSCAASGNISSSVKMGWYRQAPGKERELVASIANGASTYYADSVKGRFTISRDNAKNTVYLQMNSLKPEDTAVYYCAVAHSIYYYHDYWGQGTQVTVSS

SEQ ID NO: 42292 - protein, 117 aa, Artificial Sequence
  Chemically Synthesized
QVQLQESGGGLVQAGGSLRLSCAASGTISYQQAMGWYRQAPGKERELVAGITYGANTYYADSVKGRFTISRDNAKNTVYLQMNSLKPEDTAVYYCAVGIAFRTDHYWGQGTQVTVSS

SEQ ID NO: 42293 - protein, 122 aa, Artificial Sequence
  Chemically Synthesized
QVQLQESGGGLVQAGGSLRLSCAASGTIFFRRTMGWYRQAPGKEREFVAAIGAGGTTYYADSVKGRFTISRDNAKNTVYLQMNSLKPEDTAVYYCAAYVRRPDRYNYRHYYWGQGTQVTVSS

SEQ ID NO: 42294 - protein, 118 aa, Artificial Sequence
  Chemically Synthesized
QVQLQESGGGLVQAGGSLRLSCAASGTISTPRHMGWYRQAPGKERELVAAIAGGAITYYADSVKGRFTISRDNAKNTVYLQMNSLKPEDTAVYYCAVSELNHGGLAYWGQGTQVTVSS

SEQ ID NO: 42295 - protein, 118 aa, Artificial Sequence
  Chemically Synthesized
QVQLQESGGGLVQAGGSLRLSCAASGYISTTVQMGWYRQAPGKEREFVATIDLGASTYYADSVKGRFTISRDNAKNTVYLQMNSLKPEDTAVYYCAVYTHSAYYYGYWGQGTQVTVSS

SEQ ID NO: 42296 - protein, 126 aa, Artificial Sequence
  Chemically Synthesized
QVQLQESGGGLVQAGGSLRLSCAASGTIFPDWSMGWYRQAPGKEREFVAGIAEGGNTYYADSVKGRFTISRDNAKNTVYLQMNSLKPEDTAVYYCAAYSPAPALNANLSSLTYWYWGQGTQVTVSS

SEQ ID NO: 42297 - protein, 122 aa, Artificial Sequence
  Chemically Synthesized
QVQLQESGGGLVQAGGSLRLSCAASGTIFLSIGMGWYRQAPGKERELVAAITDGSSTYYADSVKGRFTISRDNAKNTVYLQMNSLKPEDTAVYYCAVVTNYRGPVWYYLYYWGQGTQVTVSS

SEQ ID NO: 42298 - protein, 118 aa, Artificial Sequence
  Chemically Synthesized
QVQLQESGGGLVQAGGSLRLSCAASGSISPPGEMGWYRQAPGKEREFVATIARGTSTNYADSVKGRFTISRDNAKNTVYLQMNSLKPEDTAVYYCAAYGPRDQNFPYWGQGTQVTVSS

SEQ ID NO: 42299 - protein, 122 aa, Artificial Sequence
  Chemically Synthesized
QVQLQESGGGLVQAGGSLRLSCAASGTIFRAVYMGWYRQAPGKERELVAGISLGGSTYYADSVKGRFTISRDNAKNTVYLQMNSLKPEDTAVYYCAAAYFIYPDTDYGHYYWGQGTQVTVSS

SEQ ID NO: 42300 - protein, 119 aa, Artificial Sequence
  Chemically Synthesized
QVQLQESGGGLVQAGGSLRLSCAASGSISYVAYYMGWYRQAPGKEREFVAGITHGASTNYADSVKGRFTISRDNAKNTVYLQMNSLKPEDTAVYYCAVYSYGDTYLTYWGQGTQVTVSS

SEQ ID NO: 42301 - protein, 125 aa, Artificial Sequence
  Chemically Synthesized
QVQLQESGGGLVQAGGSLRLSCAASGNIFASDYMGWYRQAPGKEREFVAAITDGANTNYADSVKGRFTISRDNAKNTVYLQMNSLKPEDTAVYYCAVARRYQGVHPDYGTFFPYWGQGTQVTVSS

SEQ ID NO: 42302 - protein, 117 aa, Artificial Sequence
  Chemically Synthesized
QVQLQESGGGLVQAGGSLRLSCAASGNISVSVMGWYRQAPGKEREFVAAIADGTNTYYADSVKGRFTISRDNAKNTVYLQMNSLKPEDTAVYYCAVESSADDYHHYWGQGTQVTVSS

SEQ ID NO: 42303 - protein, 116 aa, Artificial Sequence
  Chemically Synthesized
QVQLQESGGGLVQAGGSLRLSCAASGTISAPFVMGWYRQAPGKERELVAAIGNGATTYYADSVKGRFTISRDNAKNTVYLQMNSLKPEDTAVYYCAASYWDPFWYWGQGTQVTVSS

SEQ ID NO: 42304 - protein, 126 aa, Artificial Sequence
  Chemically Synthesized
QVQLQESGGGLVQAGGSLRLSCAASGYISWYTAMGWYRQAPGKEREFVASIAPGSTTNYADSVKGRFTISRDNAKNTVYLQMNSLKPEDTAVYYCAVDEEDALYFDYPYYHPFTYWGQGTQVTVSS

SEQ ID NO: 42305 - protein, 121 aa, Artificial Sequence
  Chemically Synthesized
QVQLQESGGGLVQAGGSLRLSCAASGSIFLVTDMGWYRQAPGKERELVAAIGGGGSTNYADSVKGRFTISRDNAKNTVYLQMNSLKPEDTAVYYCAVKYALDDYDSTTLYWGQGTQVTVSS

SEQ ID NO: 42306 - protein, 118 aa, Artificial Sequence
  Chemically Synthesized
QVQLQESGGGLVQAGGSLRLSCAASGNISPVDYMGWYRQAPGKERELVAGIDSGSTTNYADSVKGRFTISRDNAKNTVYLQMNSLKPEDTAVYYCAAHETRQPNHHYWGQGTQVTVSS

SEQ ID NO: 42307 - protein, 118 aa, Artificial Sequence
  Chemically Synthesized
QVQLQESGGGLVQAGGSLRLSCAASGYISSLYDMGWYRQAPGKERELVAGIAVGTNTYYADSVKGRFTISRDNAKNTVYLQMNSLKPEDTAVYYCAVGDIFTDWLSYWGQGTQVTVSS

SEQ ID NO: 42308 - protein, 122 aa, Artificial Sequence
  Chemically Synthesized
QVQLQESGGGLVQAGGSLRLSCAASGTIFTVGTMGWYRQAPGKEREFVAGIGYGGNTNYADSVKGRFTISRDNAKNTVYLQMNSLKPEDTAVYYCAVYAIGYDPPRDPHAYWGQGTQVTVSS

SEQ ID NO: 42309 - protein, 121 aa, Artificial Sequence
  Chemically Synthesized
QVQLQESGGGLVQAGGSLRLSCAASGSIFARTVMGWYRQAPGKEREFVAGITGGGNTNYADSVKGRFTISRDNAKNTVYLQMNSLKPEDTAVYYCAARVYERSTTTLVMYWGQGTQVTVSS

SEQ ID NO: 42310 - protein, 122 aa, Artificial Sequence
  Chemically Synthesized
QVQLQESGGGLVQAGGSLRLSCAASGNISTQTTMGWYRQAPGKERELVATIGLGAITYYADSVKGRFTISRDNAKNTVYLQMNSLKPEDTAVYYCAADTYKERGNTAPLRYWGQGTQVTVSS

SEQ ID NO: 42311 - protein, 110 aa, Artificial Sequence
  Chemically Synthesized
QVQLQESGGGLVQAGGSLRLSCAASGNIFGQEGMGWYRQAPGKEREFVAGISWGGSTYYADSVKGRFTISRDNAKNTVYLQMNSLKPEDTAVYYCADAYWGQGTQVTVSS

SEQ ID NO: 42312 - protein, 121 aa, Artificial Sequence
  Chemically Synthesized
QVQLQESGGGLVQAGGSLRLSCAASGSIFRIWYMGWYRQAPGKERELVAGISYGVIPYADSVKGRFTISRDNAKNTVYLQMNSLKPEDTAVYYCAVWYVYRRYVYYDYAYWGQGTQVTVSS

SEQ ID NO: 42313 - protein, 117 aa, Artificial Sequence
  Chemically Synthesized
QVQLQESGGGLVQAGGSLRLSCAASGYFSVPWMGWYRQAPGKERELVAGIDGGTNTNYADSVKGRFTISRDNAKNTVYLQMNSLKPEDTAVYYCAVNKHDQWWYPYWGQGTQVTVSS

SEQ ID NO: 42314 - protein, 125 aa, Artificial Sequence
  Chemically Synthesized
QVQLQESGGGLVQAGGSLRLSCAASGSISPYDTMGWYRQAPGKEREFVAILVWVVIPYADSVKGRFTISRDNAKNTVYLQMNSLKPEDTAVYYCAAPAGVFQYSDYDARLEHNYWGQGTQVTVSS

SEQ ID NO: 42315 - protein, 118 aa, Artificial Sequence
  Chemically Synthesized
QVQLQESGGGLVQAGGSLRLSCAASGYISRSAGMGWYRQAPGKEREFVATISVGTSTNYADSVKGRFTISRDNAKNTVYLQMNSLKPEDTAVYYCAAWRFLRGGHWYWGQGTQVTVSS

SEQ ID NO: 42316 - protein, 125 aa, Artificial Sequence
  Chemically Synthesized
QVQLQESGGGLVQAGGSLRLSCAASGNIFSLSMGWYRQAPGKEREFVAAIGNGSTTYYADSVKGRFTISRDNAKNTVYLQMNSLKPEDTAVYYCAAADVDWYTYEFRWAYVHEYWGQGTQVTVSS

SEQ ID NO: 42317 - protein, 118 aa, Artificial Sequence
  Chemically Synthesized
QVQLQESGGGLVQAGGSLRLSCAASGTISGGAFMGWYRQAPGKEREFVAAIDVGSNTYYADSVKGRFTISRDNAKNTVYLQMNSLKPEDTAVYYCAVYYWKWRRHAYWGQGTQVTVSS

SEQ ID NO: 42318 - protein, 118 aa, Artificial Sequence
  Chemically Synthesized
QVQLQESGGGLVQAGGSLRLSCAASGTIFSRDPMGWYRQAPGKEREFVATISDGSNTYYADSVKGRFTISRDNAKNTVYLQMNSLKPEDTAVYYCATIGTYWALHWYWGQGTQVTVSS

SEQ ID NO: 42319 - protein, 119 aa, Artificial Sequence
  Chemically Synthesized
QVQLQESGGGLVQAGGSLRLSCAASGNISKPSGMGWYRQAPGKEREFVAGISRGSSTNYADSVKGRFTISRDNAKNTVYLQMNSLKPEDTAVYYCAVPLGGHYDYYDYWGQGTQVTVSS

SEQ ID NO: 42320 - protein, 122 aa, Artificial Sequence
  Chemically Synthesized
QVQLQESGGGLVQAGGSLRLSCAASGNISAYPYMGWYRQAPGKERELVASISYGGITYYADSVKGRFTISRDNAKNTVYLQMNSLKPEDTAVYYCAANHRRRGKSVGQHDYWGQGTQVTVSS

SEQ ID NO: 42321 - protein, 118 aa, Artificial Sequence
  Chemically Synthesized
QVQLQESGGGLVQAGGSLRLSCAASGTISRSFYMGWYRQAPGKERELVATIDGGGNTNYADSVKGRFTISRDNAKNTVYLQMNSLKPEDTAVYYCAATYDYVYSYGYWGQGTQVTVSS

SEQ ID NO: 42322 - protein, 118 aa, Artificial Sequence
  Chemically Synthesized
QVQLQESGGGLVQAGGSLRLSCAASGTIFARYVMGWYRQAPGKEREFVATIGYGANTYYADSVKGRFTISRDNAKNTVYLQMNSLKPEDTAVYYCAVKDYVWPVHYYWGQGTQVTVSS

SEQ ID NO: 42323 - protein, 118 aa, Artificial Sequence
  Chemically Synthesized
QVQLQESGGGLVQAGGSLRLSCAASGTISDEYYMGWYRQAPGKERELVASIDFGANTYYADSVKGRFTISRDNAKNTVYLQMNSLKPEDTAVYYCAVGIRSTGYHAYWGQGTQVTVSS

SEQ ID NO: 42324 - protein, 126 aa, Artificial Sequence
  Chemically Synthesized
QVQLQESGGGLVQAGGSLRLSCAASGTISHAPVMGWYRQAPGKERELVATIDYGASTYYADSVKGRFTISRDNAKNTVYLQMNSLKPEDTAVYYCAAGRQYQDYINQRVWGSYGYWGQGTQVTVSS

SEQ ID NO: 42325 - protein, 118 aa, Artificial Sequence
  Chemically Synthesized
QVQLQESGGGLVQAGGSLRLSCAASGSIFAYGYMGWYRQAPGKEREFVASINVGGTTYYADSVKGRFTISRDNAKNTVYLQMNSLKPEDTAVYYCAVPYLYGIAYDYWGQGTQVTVSS

SEQ ID NO: 42326 - protein, 117 aa, Artificial Sequence
  Chemically Synthesized
QVQLQESGGGLVQAGGSLRLSCAASGYISYASAMGWYRQAPGKEREFVPVLLLVVVPYADSVKGRFTISRDNAKNTVYLQMNSLKPEDTAVYYCAAQADTARALQYWGQGTQVTVSS

SEQ ID NO: 42327 - protein, 118 aa, Artificial Sequence
  Chemically Synthesized
QVQLQESGGGLVQAGGSLRLSCAASGTIFNATYMGWYRQAPGKERELVATIADGSSTNYADSVKGRFTISRDNAKNTVYLQMNSLKPEDTAVYYCAAPGKPVGPFVYWGQGTQVTVSS

SEQ ID NO: 42328 - protein, 121 aa, Artificial Sequence
  Chemically Synthesized
QVQLQESGGGLVQAGGSLRLSCAASGSIFAPYRMGWYRQAPGKERELVATITLGSTTNYADSVKGRFTISRDNAKNTVYLQMNSLKPEDTAVYYCAYGAGWLIANGDHSYWGQGTQVTVSS

SEQ ID NO: 42329 - protein, 117 aa, Artificial Sequence
  Chemically Synthesized
QVQLQESGGGLVQAGGSLRLSCAASGTIFGYDGMGWYRQAPGKEREFVATIGLGAITYYADSVKGRFTISRDNAKNTVYLQMNSLKPEDTAVYYCAVSSTTLLLLYWGQGTQVTVSS

SEQ ID NO: 42330 - protein, 125 aa, Artificial Sequence
  Chemically Synthesized
QVQLQESGGGLVQAGGSLRLSCAASGYIFDRTMGWYRQAPGKERELVAGIAQGATTNYADSVKGRFTISRDNAKNTVYLQMNSLKPEDTAVYYCAVRYDRTDSYDDYFRYYHDYWGQGTQVTVSS

SEQ ID NO: 42331 - protein, 122 aa, Artificial Sequence
  Chemically Synthesized
QVQLQESGGGLVQAGGSLRLSCAASGTIFHGYVMGWYRQAPGKEREFVAGIGYGGNTNYADSVKGRFTISRDNAKNTVYLQMNSLKPEDTAVYYCAVDTNSPLDTYDDHTYWGQGTQVTVSS

SEQ ID NO: 42332 - protein, 122 aa, Artificial Sequence
  Chemically Synthesized
QVQLQESGGGLVQAGGSLRLSCAASGTISWQAYMGWYRQAPGKERELVAAISSGAITYYADSVKGRFTISRDNAKNTVYLQMNSLKPEDTAVYYCAAEYYNDQSYHYYHLYWGQGTQVTVSS

SEQ ID NO: 42333 - protein, 122 aa, Artificial Sequence
  Chemically Synthesized
QVQLQESGGGLVQAGGSLRLSCAASGNIFGRYDMGWYRQAPGKERELVAGISSGGNTNYADSVKGRFTISRDNAKNTVYLQMNSLKPEDTAVYYCAAPTDYHGAKYNDHYYWGQGTQVTVSS

SEQ ID NO: 42334 - protein, 118 aa, Artificial Sequence
  Chemically Synthesized
QVQLQESGGGLVQAGGSLRLSCAASGNIFYINYMGWYRQAPGKEREFVAGIDYGTTTYYADSVKGRFTISRDNAKNTVYLQMNSLKPEDTAVYYCAVTGYAYSRLIYWGQGTQVTVSS

SEQ ID NO: 42335 - protein, 119 aa, Artificial Sequence
  Chemically Synthesized
QVQLQESGGGLVQAGGSLRLSCAASGNISAVKAMGWYRQAPGKEREFVAAISVTGANTYYADSVKGRFTISRDNAKNTVYLQMNSLKPEDTAVYYCAVRLGLSTYLSYWGQGTQVTVSS

SEQ ID NO: 42336 - protein, 121 aa, Artificial Sequence
  Chemically Synthesized
QVQLQESGGGLVQAGGSLRLSCAASGTISWFPYMGWYRQAPGKEREFVASISAGTSTNYADSVKGRFTISRDNAKNTVYLQMNSLKPEDTAVYYCAALAYGWSGYWVHGYWGQGTQVTVSS

SEQ ID NO: 42337 - protein, 122 aa, Artificial Sequence
  Chemically Synthesized
QVQLQESGGGLVQAGGSLRLSCAASGSIFEGDRMGWYRQAPGKERELVAAISEGSTTYYADSVKGRFTISRDNAKNTVYLQMNSLKPEDTAVYYCAVRVDILHDIGDDHDYWGQGTQVTVSS

SEQ ID NO: 42338 - protein, 121 aa, Artificial Sequence
  Chemically Synthesized
QVQLQESGGGLVQAGGSLRLSCAASGTISYFATMGWYRQAPGKERELVATIASGAITNYADSVKGRFTISRDNAKNTVYLQMNSLKPEDTAVYYCAVLYSHYAGYDYFYYWGQGTQVTVSS

SEQ ID NO: 42339 - protein, 122 aa, Artificial Sequence
  Chemically Synthesized
QVQLQESGGGLVQAGGSLRLSCAASGNISIDNDMGWYRQAPGKEREFVASITGGASTNYADSVKGRFTISRDNAKNTVYLQMNSLKPEDTAVYYCAVEDPDIDDGVSGFDYWGQGTQVTVSS

SEQ ID NO: 42340 - protein, 117 aa, Artificial Sequence
  Chemically Synthesized
QVQLQESGGGLVQAGGSLRLSCAASGYISDRDEMGWYRQAPGKERELVAGISLVLLPYADSVKGRFTISRDNAKNTVYLQMNSLKPEDTAVYYCAVRTYDTYSYTYWGQGTQVTVSS

SEQ ID NO: 42341 - protein, 118 aa, Artificial Sequence
  Chemically Synthesized
QVQLQESGGGLVQAGGSLRLSCAASGYIFYALNMGWYRQAPGKEREFVASIGIGGTTYYADSVKGRFTISRDNAKNTVYLQMNSLKPEDTAVYYCAAYGTYSTYHYYWGQGTQVTVSS

SEQ ID NO: 42342 - protein, 118 aa, Artificial Sequence
  Chemically Synthesized
QVQLQESGGGLVQAGGSLRLSCAASGNISPAVNMGWYRQAPGKERELVATITGGATTNYADSVKGRFTISRDNAKNTVYLQMNSLKPEDTAVYYCAVLIGKRQGHPYWGQGTQVTVSS

SEQ ID NO: 42343 - protein, 122 aa, Artificial Sequence
  Chemically Synthesized
QVQLQESGGGLVQAGGSLRLSCAASGTIFVFDPMGWYRQAPGKEREFVAAIDTGGSTNYADSVKGRFTISRDNAKNTVYLQMNSLKPEDTAVYYCAAGYYYLYTYLDDHGYWGQGTQVTVSS

SEQ ID NO: 42344 - protein, 118 aa, Artificial Sequence
  Chemically Synthesized
QVQLQESGGGLVQAGGSLRLSCAASGTISGGDTMGWYRQAPGKEREFVAGITFGSTTYYADSVKGRFTISRDNAKNTVYLQMNSLKPEDTAVYYCAVRAGGRYYLYYWGQGTQVTVSS

SEQ ID NO: 42345 - protein, 122 aa, Artificial Sequence
  Chemically Synthesized
QVQLQESGGGLVQAGGSLRLSCAASGNISDPYYMGWYRQAPGKEREFVAAIAGGGTTNYADSVKGRFTISRDNAKNTVYLQMNSLKPEDTAVYYCAARWPLDGYVGYPLWYWGQGTQVTVSS

SEQ ID NO: 42346 - protein, 118 aa, Artificial Sequence
  Chemically Synthesized
QVQLQESGGGLVQAGGSLRLSCAASGTISTPHIMGWYRQAPGKEREFVAAISNGTSTYYADSVKGRFTISRDNAKNTVYLQMNSLKPEDTAVYYCAATLHGGYGFLYWGQGTQVTVSS

SEQ ID NO: 42347 - protein, 125 aa, Artificial Sequence
  Chemically Synthesized
QVQLQESGGGLVQAGGSLRLSCAASGNIFTSAYMGWYRQAPGKERELVATINIGASTNYADSVKGRFTISRDNAKNTVYLQMNSLKPEDTAVYYCAAVETYPHDYRGAYRYHYYWGQGTQVTVSS

SEQ ID NO: 42348 - protein, 125 aa, Artificial Sequence
  Chemically Synthesized
QVQLQESGGGLVQAGGSLRLSCAASGSISRQDYMGWYRQAPGKERELVASIGGGTTTNYADSVKGRFTISRDNAKNTVYLQMNSLKPEDTAVYYCAVRRRFYDYRAGYTWYHWYWGQGTQVTVSS

SEQ ID NO: 42349 - protein, 118 aa, Artificial Sequence
  Chemically Synthesized
QVQLQESGGGLVQAGGSLRLSCAASGTISDWSYMGWYRQAPGKERELVAAISGGANTNYADSVKGRFTISRDNAKNTVYLQMNSLKPEDTAVYYCAVVFGGNYWFYYWGQGTQVTVSS

SEQ ID NO: 42350 - protein, 115 aa, Artificial Sequence
  Chemically Synthesized
QVQLQESGGGLVQAGGSLRLSCAASGTISAYRYMGWYRQAPGKERELVAGISFGSTTNYADSVKGRFTISRDNAKNTVYLQMNSLKPEDTAVYYCAAAYDGLGYWGQGTQVTVSS

SEQ ID NO: 42351 - protein, 124 aa, Artificial Sequence
  Chemically Synthesized
QVQLQESGGGLVQAGGSLRLSCAASGNIFYPANMGWYRQAPGKEREFVASIALGANTNYADSVKGRFTISRDNAKNTVYLQMNSLKPEDTAVYYCAVSISYDYYYTAIWHHYYWGQGTQVTVSS

SEQ ID NO: 42352 - protein, 122 aa, Artificial Sequence
  Chemically Synthesized
QVQLQESGGGLVQAGGSLRLSCAASGYISDLPEMGWYRQAPGKEREFVAAIASGGNTYYADSVKGRFTISRDNAKNTVYLQMNSLKPEDTAVYYCAVALASYDTHGYYYWYWGQGTQVTVSS

SEQ ID NO: 42353 - protein, 119 aa, Artificial Sequence
  Chemically Synthesized
QVQLQESGGGLVQAGGSLRLSCAASGYISDISNMGWYRQAPGKERELVAAIAFGTNTYYADSVKGRFTISRDNAKNTVYLQMNSLKPEDTAVYYCAAYERYDEYYHWYWGQGTQVTVSS

SEQ ID NO: 42354 - protein, 122 aa, Artificial Sequence
  Chemically Synthesized
QVQLQESGGGLVQAGGSLRLSCAASGTISRDFSMGWYRQAPGKERELVASIANGGSTNYADSVKGRFTISRDNAKNTVYLQMNSLKPEDTAVYYCAARWDYYASDYVYYWYWGQGTQVTVSS

SEQ ID NO: 42355 - protein, 122 aa, Artificial Sequence
  Chemically Synthesized
QVQLQESGGGLVQAGGSLRLSCAASGSIFPFLVMGWYRQAPGKEREFVAGISPGANTYYADSVKGRFTISRDNAKNTVYLQMNSLKPEDTAVYYCAAYVRLADRDQRYLWYWGQGTQVTVSS

SEQ ID NO: 42356 - protein, 117 aa, Artificial Sequence
  Chemically Synthesized
QVQLQESGGGLVQAGGSLRLSCAASGSIFEARYMGWYRQAPGKEREFVAGINQGATTNYADSVKGRFTISRDNAKNTVYLQMNSLKPEDTAVYYCAAALRYVRHSYWGQGTQVTVSS

SEQ ID NO: 42357 - protein, 119 aa, Artificial Sequence
  Chemically Synthesized
QVQLQESGGGLVQAGGSLRLSCAASGNIFEGGSMGWYRQAPGKERELVATIDYGATTNYADSVKGRFTISRDNAKNTVYLQMNSLKPEDTAVYYCAATRFGFYGYHWYWGQGTQVTVSS

SEQ ID NO: 42358 - protein, 122 aa, Artificial Sequence
  Chemically Synthesized
QVQLQESGGGLVQAGGSLRLSCAASGNISGHTSMGWYRQAPGKEREFVATISLGTNTYYADSVKGRFTISRDNAKNTVYLQMNSLKPEDTAVYYCAVVYIYGQNDRTAFWYWGQGTQVTVSS

SEQ ID NO: 42359 - protein, 126 aa, Artificial Sequence
  Chemically Synthesized
QVQLQESGGGLVQAGGSLRLSCAASGSISYSRYMGWYRQAPGKERELVATIDVGAITNYADSVKGRFTISRDNAKNTVYLQMNSLKPEDTAVYYCAVVTVTTTHDRRDTGTYHYYWGQGTQVTVSS

SEQ ID NO: 42360 - protein, 121 aa, Artificial Sequence
  Chemically Synthesized
QVQLQESGGGLVQAGGSLRLSCAASGNTVWSWMGWYRQAPGKERELVATIDLGGTTNYADSVKGRFTISRDNAKNTVYLQMNSLKPEDTAVYYCAAVWYDRYNSRAYYYYWGQGTQVTVSS

SEQ ID NO: 42361 - protein, 122 aa, Artificial Sequence
  Chemically Synthesized
QVQLQESGGGLVQAGGSLRLSCAASGSISPFDAMGWYRQAPGKERELVATISQGAITNYADSVKGRFTISRDNAKNTVYLQMNSLKPEDTAVYYCAVRTLFPGLTYAYFYYWGQGTQVTVSS

SEQ ID NO: 42362 - protein, 118 aa, Artificial Sequence
  Chemically Synthesized
QVQLQESGGGLVQAGGSLRLSCAASGSISTPYFMGWYRQAPGKEREFVAGINSGSNTNYADSVKGRFTISRDNAKNTVYLQMNSLKPEDTAVYYCAVVERGYSTYGYWGQGTQVTVSS

SEQ ID NO: 42363 - protein, 122 aa, Artificial Sequence
  Chemically Synthesized
QVQLQESGGGLVQAGGSLRLSCAASGTISPTSDMGWYRQAPGKEREFVAAINVGASTYYADSVKGRFTISRDNAKNTVYLQMNSLKPEDTAVYYCAVRDYFGPQHNYYFYYWGQGTQVTVSS

SEQ ID NO: 42364 - protein, 122 aa, Artificial Sequence
  Chemically Synthesized
QVQLQESGGGLVQAGGSLRLSCAASGNISGYDIMGWYRQAPGKEREFVATITYGSNTNYADSVKGRFTISRDNAKNTVYLQMNSLKPEDTAVYYCAAVTIVYDEYPTGYWYWGQGTQVTVSS

SEQ ID NO: 42365 - protein, 122 aa, Artificial Sequence
  Chemically Synthesized
QVQLQESGGGLVQAGGSLRLSCAASGSISDGTVMGWYRQAPGKEREFVAGIASGATTNYADSVKGRFTISRDNAKNTVYLQMNSLKPEDTAVYYCAVTAVENWGYTVYHWYWGQGTQVTVSS

SEQ ID NO: 42366 - protein, 120 aa, Artificial Sequence
  Chemically Synthesized
QVQLQESGGGLVQAGGSLRLSCAASGYISDYDAMGWYRQAPGKERELVATITGGSTNYADSVKGRFTISRDNAKNTVYLQMNSLKPEDTAVYYCAAWVDSEYYGWRHYYWGQGTQVTVSS

SEQ ID NO: 42367 - protein, 125 aa, Artificial Sequence
  Chemically Synthesized
QVQLQESGGGLVQAGGSLRLSCAASGNISKGNYMGWYRQAPGKEREFVATITDGTTTYYADSVKGRFTISRDNAKNTVYLQMNSLKPEDTAVYYCAAVIVYFYISRTPPVYHWYWGQGTQVTVSS

SEQ ID NO: 42368 - protein, 122 aa, Artificial Sequence
  Chemically Synthesized
QVQLQESGGGLVQAGGSLRLSCAASGTIFQQYYMGWYRQAPGKEREFVATIDYGGITNYADSVKGRFTISRDNAKNTVYLQMNSLKPEDTAVYYCAAVERFDSPYPYYFWYWGQGTQVTVSS

SEQ ID NO: 42369 - protein, 123 aa, Artificial Sequence
  Chemically Synthesized
QVQLQESGGGLVQAGGSLRLSCAASGNISPRPVMGWYRQAPGKERELVATIGYGASTNYADSVKGRFTISRDNAKNTVYLQMNSLKPEDTAVYYCAVYYATWYDTVPYYFWYWGQGTQVTVSS

SEQ ID NO: 42370 - protein, 122 aa, Artificial Sequence
  Chemically Synthesized
QVQLQESGGGLVQAGGSLRLSCAASGTIFDVIHMGWYRQAPGKERELVAGIDDGGTTNYADSVKGRFTISRDNAKNTVYLQMNSLKPEDTAVYYCAAYRTVGDYYVYYHWYWGQGTQVTVSS

SEQ ID NO: 42371 - protein, 122 aa, Artificial Sequence
  Chemically Synthesized
QVQLQESGGGLVQAGGSLRLSCAASGYIFPPYFMGWYRQAPGKEREFVAAIGDGANTNYADSVKGRFTISRDNAKNTVYLQMNSLKPEDTAVYYCAALAQVNGVRNGWHYYWGQGTQVTVSS

SEQ ID NO: 42372 - protein, 121 aa, Artificial Sequence
  Chemically Synthesized
QVQLQESGGGLVQAGGSLRLSCAASGYISQEVMGWYRQAPGKERELVATIGDGGTTNYADSVKGRFTISRDNAKNTVYLQMNSLKPEDTAVYYCAVGANERIGENRVFDYWGQGTQVTVSS

SEQ ID NO: 42373 - protein, 122 aa, Artificial Sequence
  Chemically Synthesized
QVQLQESGGGLVQAGGSLRLSCAASGSISGGYIMGWYRQAPGKEREFVAGITDGGNTYYADSVKGRFTISRDNAKNTVYLQMNSLKPEDTAVYYCAVLPLVNSTWTYPYEYWGQGTQVTVSS

SEQ ID NO: 42374 - protein, 122 aa, Artificial Sequence
  Chemically Synthesized
QVQLQESGGGLVQAGGSLRLSCAASGYISRSTAMGWYRQAPGKEREFVAAIASGATTNYADSVKGRFTISRDNAKNTVYLQMNSLKPEDTAVYYCAVVYHAYYDTDYYYYYWGQGTQVTVSS

SEQ ID NO: 42375 - protein, 118 aa, Artificial Sequence
  Chemically Synthesized
QVQLQESGGGLVQAGGSLRLSCAASGTISVLTYMGWYRQAPGKEREFVATIAPGGTTNYADSVKGRFTISRDNAKNTVYLQMNSLKPEDTAVYYCAVASYRSGWHYYWGQGTQVTVSS

SEQ ID NO: 42376 - protein, 126 aa, Artificial Sequence
  Chemically Synthesized
QVQLQESGGGLVQAGGSLRLSCAASGTISYYDIMGWYRQAPGKERELVASINQGSSTNYADSVKGRFTISRDNAKNTVYLQMNSLKPEDTAVYYCAAYYIRQDGVGSYARYYYWYWGQGTQVTVSS

SEQ ID NO: 42377 - protein, 123 aa, Artificial Sequence
  Chemically Synthesized
QVQLQESGGGLVQAGGSLRLSCAASGTISGRIYMGWYRQAPGKERELVATITSGSSTNYADSVKGRFTISRDNAKNTVYLQMNSLKPEDTAVYYCAATDTRYYYSTPIAYWYWGQGTQVTVSS

SEQ ID NO: 42378 - protein, 121 aa, Artificial Sequence
  Chemically Synthesized
QVQLQESGGGLVQAGGSLRLSCAASGSILCVLMGWYRQAPGKERELVASITDGANTNYADSVKGRFTISRDNAKNTVYLQMNSLKPEDTAVYYCAVDDVWYYPDYVAYYYWGQGTQVTVSS

SEQ ID NO: 42379 - protein, 126 aa, Artificial Sequence
  Chemically Synthesized
QVQLQESGGGLVQAGGSLRLSCAASGSISREAYMGWYRQAPGKERELVATITYGAITNYADSVKGRFTISRDNAKNTVYLQMNSLKPEDTAVYYCAAVWRIDIASSYAQYGYLYYWGQGTQVTVSS

SEQ ID NO: 42380 - protein, 122 aa, Artificial Sequence
  Chemically Synthesized
QVQLQESGGGLVQAGGSLRLSCAASGSIFRPIAMGWYRQAPGKEREFVASIDYGGSTYYADSVKGRFTISRDNAKNTVYLQMNSLKPEDTAVYYCAVSLDVRDGAQYYHWYWGQGTQVTVSS

SEQ ID NO: 42381 - protein, 118 aa, Artificial Sequence
  Chemically Synthesized
QVQLQESGGGLVQAGGSLRLSCAASGTISQVYYMGWYRQAPGKEREFVAGITDGTSTNYADSVKGRFTISRDNAKNTVYLQMNSLKPEDTAVYYCAVVPSKHSVYGYWGQGTQVTVSS

SEQ ID NO: 42382 - protein, 122 aa, Artificial Sequence
  Chemically Synthesized
QVQLQESGGGLVQAGGSLRLSCAASGNISLAYAMGWYRQAPGKERELVASIASGGITNYADSVKGRFTISRDNAKNTVYLQMNSLKPEDTAVYYCAAYSKRYYDVYYYFYYWGQGTQVTVSS

SEQ ID NO: 42383 - protein, 122 aa, Artificial Sequence
  Chemically Synthesized
QVQLQESGGGLVQAGGSLRLSCAASGTISYELYMGWYRQAPGKEREFVATINYGGITNYADSVKGRFTISRDNAKNTVYLQMNSLKPEDTAVYYCAVTERHGELHYTYHWYWGQGTQVTVSS

SEQ ID NO: 42384 - protein, 120 aa, Artificial Sequence
  Chemically Synthesized
QVQLQESGGGLVQAGGSLRLSCAASGTISAPNLMGWYRQAPGKERELVASINVGTITYYADSVKGRFTISRDNAKNTVYLQMNSLKPEDTAVYYCAARQYWAYRTWFYYWGQGTQVTVSS

SEQ ID NO: 42385 - protein, 122 aa, Artificial Sequence
  Chemically Synthesized
QVQLQESGGGLVQAGGSLRLSCAASGNIFPTDVMGWYRQAPGKERELVATIGSGANTNYADSVKGRFTISRDNAKNTVYLQMNSLKPEDTAVYYCAVYWTYDQPYRIRHYYWGQGTQVTVSS

SEQ ID NO: 42386 - protein, 122 aa, Artificial Sequence
  Chemically Synthesized
QVQLQESGGGLVQAGGSLRLSCAASGNISTPYSMGWYRQAPGKEREFVASISTGGTTYYADSVKGRFTISRDNAKNTVYLQMNSLKPEDTAVYYCAVGFGSGDYRDPYYWYWGQGTQVTVSS

SEQ ID NO: 42387 - protein, 122 aa, Artificial Sequence
  Chemically Synthesized
QVQLQESGGGLVQAGGSLRLSCAASGNISFSHTMGWYRQAPGKEREFVASIADGATTNYADSVKGRFTISRDNAKNTVYLQMNSLKPEDTAVYYCAANHTYKARVPITFWYWGQGTQVTVSS

SEQ ID NO: 42388 - protein, 122 aa, Artificial Sequence
  Chemically Synthesized
QVQLQESGGGLVQAGGSLRLSCAASGSIFDYTNMGWYRQAPGKERELVAAIAYGASTNYADSVKGRFTISRDNAKNTVYLQMNSLKPEDTAVYYCAAYTVTFGNTYVYHWYWGQGTQVTVSS

SEQ ID NO: 42389 - protein, 126 aa, Artificial Sequence
  Chemically Synthesized
QVQLQESGGGLVQAGGSLRLSCAASGSISQDDTMGWYRQAPGKERELVATISYGSNTNYADSVKGRFTISRDNAKNTVYLQMNSLKPEDTAVYYCAVYSPRYALRQDPKPAYFYYWGQGTQVTVSS

SEQ ID NO: 42390 - protein, 122 aa, Artificial Sequence
  Chemically Synthesized
QVQLQESGGGLVQAGGSLRLSCAASGTISDTDYMGWYRQAPGKERELVASIAGGSITNYADSVKGRFTISRDNAKNTVYLQMNSLKPEDTAVYYCAVRRRLLGWEQVYFWYWGQGTQVTVSS

SEQ ID NO: 42391 - protein, 122 aa, Artificial Sequence
  Chemically Synthesized
QVQLQESGGGLVQAGGSLRLSCAASGTIFGRDVMGWYRQAPGKERELVATIDSGGTTNYADSVKGRFTISRDNAKNTVYLQMNSLKPEDTAVYYCAVRLFGYPQSISYYYYWGQGTQVTVSS

SEQ ID NO: 42392 - protein, 122 aa, Artificial Sequence
  Chemically Synthesized
QVQLQESGGGLVQAGGSLRLSCAASGTISVGFSMGWYRQAPGKERELVATIDTGANTNYADSVKGRFTISRDNAKNTVYLQMNSLKPEDTAVYYCAARYTPAKRENWFYYYWGQGTQVTVSS

SEQ ID NO: 42393 - protein, 120 aa, Artificial Sequence
  Chemically Synthesized
QVQLQESGGGLVQAGGSLRLSCAASGYIFQSLVMGWYRQAPGKEREFVAGIGTGSSTNYADSVKGRFTISRDNAKNTVYLQMNSLKPEDTAVYYCAAYYHAQTGGYYWYWGQGTQVTVSS

SEQ ID NO: 42394 - protein, 126 aa, Artificial Sequence
  Chemically Synthesized
QVQLQESGGGLVQAGGSLRLSCAASGNISNTASMGWYRQAPGKERELVASIDYGSSTYYADSVKGRFTISRDNAKNTVYLQMNSLKPEDTAVYYCAVVQPFYLGYDHDYLGYYYYWGQGTQVTVSS

SEQ ID NO: 42395 - protein, 122 aa, Artificial Sequence
  Chemically Synthesized
QVQLQESGGGLVQAGGSLRLSCAASGYISNDSYMGWYRQAPGKEREFVATITYGGSTYYADSVKGRFTISRDNAKNTVYLQMNSLKPEDTAVYYCAAVHVYPDTPYTYYYYWGQGTQVTVSS

SEQ ID NO: 42396 - protein, 118 aa, Artificial Sequence
  Chemically Synthesized
QVQLQESGGGLVQAGGSLRLSCAASGYISYPYNMGWYRQAPGKEREFVAAITYGANTYYADSVKGRFTISRDNAKNTVYLQMNSLKPEDTAVYYCAVVGWFTYTLQYWGQGTQVTVSS

SEQ ID NO: 42397 - protein, 122 aa, Artificial Sequence
  Chemically Synthesized
QVQLQESGGGLVQAGGSLRLSCAASGTIFHYGFMGWYRQAPGKEREFVASISDGSTTNYADSVKGRFTISRDNAKNTVYLQMNSLKPEDTAVYYCAAYYRDPDVGYAYHWYWGQGTQVTVSS

SEQ ID NO: 42398 - protein, 126 aa, Artificial Sequence
  Chemically Synthesized
QVQLQESGGGLVQAGGSLRLSCAASGSISVAYRMGWYRQAPGKEREFVAGITTGATTYYADSVKGRFTISRDNAKNTVYLQMNSLKPEDTAVYYCAAVFRAVYFTDVPGSPWYYYWGQGTQVTVSS

SEQ ID NO: 42399 - protein, 122 aa, Artificial Sequence
  Chemically Synthesized
QVQLQESGGGLVQAGGSLRLSCAASGNIFDPVYMGWYRQAPGKEREFVATIADGAITNYADSVKGRFTISRDNAKNTVYLQMNSLKPEDTAVYYCAVVAAYQYATTWYHWYWGQGTQVTVSS

SEQ ID NO: 42400 - protein, 122 aa, Artificial Sequence
  Chemically Synthesized
QVQLQESGGGLVQAGGSLRLSCAASGNIFDSADMGWYRQAPGKEREFVATIASGGITYYADSVKGRFTISRDNAKNTVYLQMNSLKPEDTAVYYCAAVYVYWQDTWYAYWYWGQGTQVTVSS

SEQ ID NO: 42401 - protein, 122 aa, Artificial Sequence
  Chemically Synthesized
QVQLQESGGGLVQAGGSLRLSCAASGSISHRSFMGWYRQAPGKEREFVAGISYGATTNYADSVKGRFTISRDNAKNTVYLQMNSLKPEDTAVYYCAVVWVQYVTAATYHYYWGQGTQVTVSS

SEQ ID NO: 42402 - protein, 126 aa, Artificial Sequence
  Chemically Synthesized
QVQLQESGGGLVQAGGSLRLSCAASGYISGGPTMGWYRQAPGKERELVAGIDHGASTYYADSVKGRFTISRDNAKNTVYLQMNSLKPEDTAVYYCAAVKYGSYGAYHRYDHAHWYWGQGTQVTVSS

SEQ ID NO: 42403 - protein, 118 aa, Artificial Sequence
  Chemically Synthesized
QVQLQESGGGLVQAGGSLRLSCAASGSISDDFYMGWYRQAPGKEREFVAGITPGASTNYADSVKGRFTISRDNAKNTVYLQMNSLKPEDTAVYYCAVLVTGYYYFYYWGQGTQVTVSS

SEQ ID NO: 42404 - protein, 126 aa, Artificial Sequence
  Chemically Synthesized
QVQLQESGGGLVQAGGSLRLSCAASGSIFPNGYMGWYRQAPGKERELVASIAYGANTNYADSVKGRFTISRDNAKNTVYLQMNSLKPEDTAVYYCAAVGVLSETDRAWLYRYHYYWGQGTQVTVSS

SEQ ID NO: 42405 - protein, 118 aa, Artificial Sequence
  Chemically Synthesized
QVQLQESGGGLVQAGGSLRLSCAASGNIFDIRYMGWYRQAPGKERELVAGIGYGSNTYYADSVKGRFTISRDNAKNTVYLQMNSLKPEDTAVYYCAVATDVPYVHAYWGQGTQVTVSS

SEQ ID NO: 42406 - protein, 119 aa, Artificial Sequence
  Chemically Synthesized
QVQLQESGGGLVQAGGSLRLSCAASGNISTGEYMGWYRQAPGKERELVAGIGNGSTTNYADSVKGRFTISRDNAKNTVYLQMNSLKPEDTAVYYCAARLNTYYGVLYYWGQGTQVTVSS

SEQ ID NO: 42407 - protein, 122 aa, Artificial Sequence
  Chemically Synthesized
QVQLQESGGGLVQAGGSLRLSCAASGTISKLSRMGWYRQAPGKEREFVAAIADGTTTYYADSVKGRFTISRDNAKNTVYLQMNSLKPEDTAVYYCAVYYLYDDYPHVYFWYWGQGTQVTVSS

SEQ ID NO: 42408 - protein, 126 aa, Artificial Sequence
  Chemically Synthesized
QVQLQESGGGLVQAGGSLRLSCAASGTISAYWRMGWYRQAPGKERELVAAISIGGTTYYADSVKGRFTISRDNAKNTVYLQMNSLKPEDTAVYYCAAVDAIQRIGPENVTRYFYYWGQGTQVTVSS

SEQ ID NO: 42409 - protein, 122 aa, Artificial Sequence
  Chemically Synthesized
QVQLQESGGGLVQAGGSLRLSCAASGSISPDYYMGWYRQAPGKERELVASIDPGTTTNYADSVKGRFTISRDNAKNTVYLQMNSLKPEDTAVYYCAAAYDYYADYAVRHWYWGQGTQVTVSS

SEQ ID NO: 42410 - protein, 122 aa, Artificial Sequence
  Chemically Synthesized
QVQLQESGGGLVQAGGSLRLSCAASGNISRLQDMGWYRQAPGKEREFVASIGEGGNTNYADSVKGRFTISRDNAKNTVYLQMNSLKPEDTAVYYCAATYRYALIPPTYYWYWGQGTQVTVSS

SEQ ID NO: 42411 - protein, 122 aa, Artificial Sequence
  Chemically Synthesized
QVQLQESGGGLVQAGGSLRLSCAASGTIFGDHYMGWYRQAPGKERELVATITGGGNTNYADSVKGRFTISRDNAKNTVYLQMNSLKPEDTAVYYCAAVYYEYYDIAYWLYYWGQGTQVTVSS

SEQ ID NO: 42412 - protein, 122 aa, Artificial Sequence
  Chemically Synthesized
QVQLQESGGGLVQAGGSLRLSCAASGNISGERYMGWYRQAPGKEREFVAAIAIGANTNYADSVKGRFTISRDNAKNTVYLQMNSLKPEDTAVYYCAAVIGYDSLPYYYFYYWGQGTQVTVSS

SEQ ID NO: 42413 - protein, 122 aa, Artificial Sequence
  Chemically Synthesized
QVQLQESGGGLVQAGGSLRLSCAASGNIFVLDTMGWYRQAPGKERELVATIGDGSITYYADSVKGRFTISRDNAKNTVYLQMNSLKPEDTAVYYCAVTRRIGSQYPVYFWYWGQGTQVTVSS

SEQ ID NO: 42414 - protein, 118 aa, Artificial Sequence
  Chemically Synthesized
QVQLQESGGGLVQAGGSLRLSCAASGSISDYYAMGWYRQAPGKEREFVAGITLGASTYYADSVKGRFTISRDNAKNTVYLQMNSLKPEDTAVYYCAAWVSFYYGFDYWGQGTQVTVSS

SEQ ID NO: 42415 - protein, 118 aa, Artificial Sequence
  Chemically Synthesized
QVQLQESGGGLVQAGGSLRLSCAASGTISRGTLMGWYRQAPGKEREFVAAIDNGSSTNYADSVKGRFTISRDNAKNTVYLQMNSLKPEDTAVYYCAAIDYNTIYHYYWGQGTQVTVSS

SEQ ID NO: 42416 - protein, 122 aa, Artificial Sequence
  Chemically Synthesized
QVQLQESGGGLVQAGGSLRLSCAASGYISRGFRMGWYRQAPGKERELVATITGGGNTYYADSVKGRFTISRDNAKNTVYLQMNSLKPEDTAVYYCAVTYVPSYDPPIAYWYWGQGTQVTVSS

SEQ ID NO: 42417 - protein, 126 aa, Artificial Sequence
  Chemically Synthesized
QVQLQESGGGLVQAGGSLRLSCAASGTIFYGPIMGWYRQAPGKEREFVATIAAGTTTYYADSVKGRFTISRDNAKNTVYLQMNSLKPEDTAVYYCAAPYKDAENYTYDPRRGYLYWGQGTQVTVSS

SEQ ID NO: 42418 - protein, 122 aa, Artificial Sequence
  Chemically Synthesized
QVQLQESGGGLVQAGGSLRLSCAASGNISHYYSMGWYRQAPGKEREFVAAIGTGGSTNYADSVKGRFTISRDNAKNTVYLQMNSLKPEDTAVYYCAVTDNGYGVSYVYFWYWGQGTQVTVSS

SEQ ID NO: 42419 - protein, 121 aa, Artificial Sequence
  Chemically Synthesized
QVQLQESGGGLVQAGGSLRLSCAASGSIFDTQMGWYRQAPGKEREFVAGIDRGATTNYADSVKGRFTISRDNAKNTVYLQMNSLKPEDTAVYYCAATVPYYDYVHVYYWYWGQGTQVTVSS

SEQ ID NO: 42420 - protein, 118 aa, Artificial Sequence
  Chemically Synthesized
QVQLQESGGGLVQAGGSLRLSCAASGSISVRAFMGWYRQAPGKERELVAGIGNGANTNYADSVKGRFTISRDNAKNTVYLQMNSLKPEDTAVYYCAVLADGRDRLDYWGQGTQVTVSS

SEQ ID NO: 42421 - protein, 122 aa, Artificial Sequence
  Chemically Synthesized
QVQLQESGGGLVQAGGSLRLSCAASGNISSAGEMGWYRQAPGKERELVATIGLGGSTNYADSVKGRFTISRDNAKNTVYLQMNSLKPEDTAVYYCAVLYNYGPFRRHYFYYWGQGTQVTVSS

SEQ ID NO: 42422 - protein, 118 aa, Artificial Sequence
  Chemically Synthesized
QVQLQESGGGLVQAGGSLRLSCAASGTISQAKYMGWYRQAPGKEREFVAAIDYGGSTYYADSVKGRFTISRDNAKNTVYLQMNSLKPEDTAVYYCAAYGWPDGDLGYWGQGTQVTVSS

SEQ ID NO: 42423 - protein, 122 aa, Artificial Sequence
  Chemically Synthesized
QVQLQESGGGLVQAGGSLRLSCAASGNIFIWYLMGWYRQAPGKERELVASINGGGSTYYADSVKGRFTISRDNAKNTVYLQMNSLKPEDTAVYYCAARDGNGSLRFPFFYYWGQGTQVTVSS

SEQ ID NO: 42424 - protein, 122 aa, Artificial Sequence
  Chemically Synthesized
QVQLQESGGGLVQAGGSLRLSCAASGYIFPTLFMGWYRQAPGKEREFVASIDQGTNTYYADSVKGRFTISRDNAKNTVYLQMNSLKPEDTAVYYCAAYEDYGQDPTVRHWYWGQGTQVTVSS

SEQ ID NO: 42425 - protein, 126 aa, Artificial Sequence
  Chemically Synthesized
QVQLQESGGGLVQAGGSLRLSCAASGSIFGDSYMGWYRQAPGKEREFVATIADGSNTNYADSVKGRFTISRDNAKNTVYLQMNSLKPEDTAVYYCAVTWRWYDAYHSHDYAYHYYWGQGTQVTVSS

SEQ ID NO: 42426 - protein, 118 aa, Artificial Sequence
  Chemically Synthesized
QVQLQESGGGLVQAGGSLRLSCAASGTIFTSDGMGWYRQAPGKEREFVASIGLGGSTYYADSVKGRFTISRDNAKNTVYLQMNSLKPEDTAVYYCAAGYHYTYWYWYWGQGTQVTVSS

SEQ ID NO: 42427 - protein, 118 aa, Artificial Sequence
  Chemically Synthesized
QVQLQESGGGLVQAGGSLRLSCAASGTIFYHAGMGWYRQAPGKEREFVATIDGGANTNYADSVKGRFTISRDNAKNTVYLQMNSLKPEDTAVYYCAALSGFWVRHYYWGQGTQVTVSS

SEQ ID NO: 42428 - protein, 122 aa, Artificial Sequence
  Chemically Synthesized
QVQLQESGGGLVQAGGSLRLSCAASGTIFPPDQMGWYRQAPGKEREFVAAISQGSNTNYADSVKGRFTISRDNAKNTVYLQMNSLKPEDTAVYYCAVLFEVYTDTFGYLYYWGQGTQVTVSS

SEQ ID NO: 42429 - protein, 118 aa, Artificial Sequence
  Chemically Synthesized
QVQLQESGGGLVQAGGSLRLSCAASGYIFPGGNMGWYRQAPGKEREFVAAINRGSNTNYADSVKGRFTISRDNAKNTVYLQMNSLKPEDTAVYYCAALYRAAVVHYYWGQGTQVTVSS

SEQ ID NO: 42430 - protein, 120 aa, Artificial Sequence
  Chemically Synthesized
QVQLQESGGGLVQAGGSLRLSCAASGSIFTYIYMGWYRQAPGKERELVAGISGGSTTNYADSVKGRFTISRDNAKNTVYLQMNSLKPEDTAVYYCAAYYYREPYRYYWYWGQGTQVTVSS

SEQ ID NO: 42431 - protein, 122 aa, Artificial Sequence
  Chemically Synthesized
QVQLQESGGGLVQAGGSLRLSCAASGSIFGTLFMGWYRQAPGKEREFVAAIARGATTNYADSVKGRFTISRDNAKNTVYLQMNSLKPEDTAVYYCAVASAVTGGSNYQHWYWGQGTQVTVSS

SEQ ID NO: 42432 - protein, 122 aa, Artificial Sequence
  Chemically Synthesized
QVQLQESGGGLVQAGGSLRLSCAASGNISGVQFMGWYRQAPGKERELVATIATGGITYYADSVKGRFTISRDNAKNTVYLQMNSLKPEDTAVYYCAAVANIPERYIDNLYYWGQGTQVTVSS

SEQ ID NO: 42433 - protein, 118 aa, Artificial Sequence
  Chemically Synthesized
QVQLQESGGGLVQAGGSLRLSCAASGNIFYSSSMGWYRQAPGKEREFVAGIGGGTNTNYADSVKGRFTISRDNAKNTVYLQMNSLKPEDTAVYYCAAVKRPTIAHYYWGQGTQVTVSS

SEQ ID NO: 42434 - protein, 126 aa, Artificial Sequence
  Chemically Synthesized
QVQLQESGGGLVQAGGSLRLSCAASGSISYTSRMGWYRQAPGKEREFVAGIGAGTTTNYADSVKGRFTISRDNAKNTVYLQMNSLKPEDTAVYYCAAYQARKNAWRDDVYATFWYWGQGTQVTVSS

SEQ ID NO: 42435 - protein, 122 aa, Artificial Sequence
  Chemically Synthesized
QVQLQESGGGLVQAGGSLRLSCAASGTISRYLVMGWYRQAPGKERELVASINPGANTNYADSVKGRFTISRDNAKNTVYLQMNSLKPEDTAVYYCAAYWDPYPKYYIRYWYWGQGTQVTVSS

SEQ ID NO: 42436 - protein, 125 aa, Artificial Sequence
  Chemically Synthesized
QVQLQESGGGLVQAGGSLRLSCAASGSISLGDFMGWYRQAPGKERELVATISVGATTNYADSVKGRFTISRDNAKNTVYLQMNSLKPEDTAVYYCAVTLVKFGGDYTYYTYYYYWGQGTQVTVSS

SEQ ID NO: 42437 - protein, 124 aa, Artificial Sequence
  Chemically Synthesized
QVQLQESGGGLVQAGGSLRLSCAASGNISREPAMGWYRQAPGKEREFVASIAAGANTYYADSVKGRFTISRDNAKNTVYLQMNSLKPEDTAVYYCAVDTYRRSDYADVAYHWYWGQGTQVTVSS

SEQ ID NO: 42438 - protein, 126 aa, Artificial Sequence
  Chemically Synthesized
QVQLQESGGGLVQAGGSLRLSCAASGYISQVGYMGWYRQAPGKEREFVASINDGSTTNYADSVKGRFTISRDNAKNTVYLQMNSLKPEDTAVYYCAVRYTWRVAAGTYGGTYLWYWGQGTQVTVSS

SEQ ID NO: 42439 - protein, 122 aa, Artificial Sequence
  Chemically Synthesized
QVQLQESGGGLVQAGGSLRLSCAASGSIFWDTWMGWYRQAPGKEREFVATINPGSSTYYADSVKGRFTISRDNAKNTVYLQMNSLKPEDTAVYYCAAYAQTYYLHKYYYYYWGQGTQVTVSS

SEQ ID NO: 42440 - protein, 118 aa, Artificial Sequence
  Chemically Synthesized
QVQLQESGGGLVQAGGSLRLSCAASGTISGYRYMGWYRQAPGKERELVAGIALGGSTNYADSVKGRFTISRDNAKNTVYLQMNSLKPEDTAVYYCAAAYDGTHSFAYWGQGTQVTVSS

SEQ ID NO: 42441 - protein, 113 aa, Artificial Sequence
  Chemically Synthesized
QVQLQESGGGLVQAGGSLRLSCAASGNISDLVYMGWYRQAPGKERELVAAISEGGITYYADSVKGRFTISRDNAKNTVYLQMNSLKPEDTAVYYCAVDSQYYWGQGTQVTVSS

SEQ ID NO: 42442 - protein, 118 aa, Artificial Sequence
  Chemically Synthesized
QVQLQESGGGLVQAGGSLRLSCAASGSISTIYAMGWYRQAPGKEREFVAAINIGGSTNYADSVKGRFTISRDNAKNTVYLQMNSLKPEDTAVYYCAVVVYEYQYYGYWGQGTQVTVSS

SEQ ID NO: 42443 - protein, 118 aa, Artificial Sequence
  Chemically Synthesized
QVQLQESGGGLVQAGGSLRLSCAASGYISDAPSMGWYRQAPGKEREFVAGITSGASTNYADSVKGRFTISRDNAKNTVYLQMNSLKPEDTAVYYCAAIQYYKTWHSYWGQGTQVTVSS

SEQ ID NO: 42444 - protein, 118 aa, Artificial Sequence
  Chemically Synthesized
QVQLQESGGGLVQAGGSLRLSCAASGTISYWYFMGWYRQAPGKEREFVAGITVGANTNYADSVKGRFTISRDNAKNTVYLQMNSLKPEDTAVYYCAAVQRTRDRYGYWGQGTQVTVSS

SEQ ID NO: 42445 - protein, 118 aa, Artificial Sequence
  Chemically Synthesized
QVQLQESGGGLVQAGGSLRLSCAASGTISYSHRMGWYRQAPGKERELVATIDGGGTTYYADSVKGRFTISRDNAKNTVYLQMNSLKPEDTAVYYCAASSRDGYSHPYWGQGTQVTVSS

SEQ ID NO: 42446 - protein, 126 aa, Artificial Sequence
  Chemically Synthesized
QVQLQESGGGLVQAGGSLRLSCAASGTIFIGNTMGWYRQAPGKEREFVAAITYGGNTNYADSVKGRFTISRDNAKNTVYLQMNSLKPEDTAVYYCAAYWGDYFDKGSPIHPFHKYWGQGTQVTVSS

SEQ ID NO: 42447 - protein, 122 aa, Artificial Sequence
  Chemically Synthesized
QVQLQESGGGLVQAGGSLRLSCAASGSIFRWADMGWYRQAPGKEREFVAGITTGSSTYYADSVKGRFTISRDNAKNTVYLQMNSLKPEDTAVYYCAAPALGLDRNLYRLPYWGQGTQVTVSS

SEQ ID NO: 42448 - protein, 118 aa, Artificial Sequence
  Chemically Synthesized
QVQLQESGGGLVQAGGSLRLSCAASGTISAGNGMGWYRQAPGKERELVATINRGASTYYADSVKGRFTISRDNAKNTVYLQMNSLKPEDTAVYYCAADDYDQGDYVYWGQGTQVTVSS

SEQ ID NO: 42449 - protein, 118 aa, Artificial Sequence
  Chemically Synthesized
QVQLQESGGGLVQAGGSLRLSCAASGNIFFIYDMGWYRQAPGKEREFVATIGTGATTYYADSVKGRFTISRDNAKNTVYLQMNSLKPEDTAVYYCAADLSRISDYRYWGQGTQVTVSS

SEQ ID NO: 42450 - protein, 118 aa, Artificial Sequence
  Chemically Synthesized
QVQLQESGGGLVQAGGSLRLSCAASGTIFRGDLMGWYRQAPGKERELVAAIDLGTITNYADSVKGRFTISRDNAKNTVYLQMNSLKPEDTAVYYCAAGYADYVDLSYWGQGTQVTVSS

SEQ ID NO: 42451 - protein, 121 aa, Artificial Sequence
  Chemically Synthesized
QVQLQESGGGLVQAGGSLRLSCAASGTISADGYMGWYRQAPGKEREFVAGIGDGANTNYADSVKGRFTISRDNAKNTVYLQMNSLKPEDTAVYYCAVNRYGYGPQSVLMYWGQGTQVTVSS

SEQ ID NO: 42452 - protein, 117 aa, Artificial Sequence
  Chemically Synthesized
QVQLQESGGGLVQAGGSLRLSCAASGTIFRVTMGWYRQAPGKERELVASIADGSITNYADSVKGRFTISRDNAKNTVYLQMNSLKPEDTAVYYCAAYWSYKSYHAYWGQGTQVTVSS

SEQ ID NO: 42453 - protein, 122 aa, Artificial Sequence
  Chemically Synthesized
QVQLQESGGGLVQAGGSLRLSCAASGSISRYQVMGWYRQAPGKEREFVATIAEGSSTYYADSVKGRFTISRDNAKNTVYLQMNSLKPEDTAVYYCAADSPAYALDRYSYIYWGQGTQVTVSS

SEQ ID NO: 42454 - protein, 121 aa, Artificial Sequence
  Chemically Synthesized
QVQLQESGGGLVQAGGSLRLSCAASGTIFPSHIMGWYRQAPGKERELVAAITLGGSTNYADSVKGRFTISRDNAKNTVYLQMNSLKPEDTAVYYCAVPESSTTLLSTTLYWGQGTQVTVSS

SEQ ID NO: 42455 - protein, 116 aa, Artificial Sequence
  Chemically Synthesized
QVQLQESGGGLVQAGGSLRLSCAASGTISDQMGWYRQAPGKERELVAAITHGTNTNYADSVKGRFTISRDNAKNTVYLQMNSLKPEDTAVYYCAAGYRNLGVHYYWGQGTQVTVSS

SEQ ID NO: 42456 - protein, 118 aa, Artificial Sequence
  Chemically Synthesized
QVQLQESGGGLVQAGGSLRLSCAASGNIFAYQDMGWYRQAPGKERELVASIATGGTTNYADSVKGRFTISRDNAKNTVYLQMNSLKPEDTAVYYCAVKPDDGTRYRYWGQGTQVTVSS

SEQ ID NO: 42457 - protein, 119 aa, Artificial Sequence
  Chemically Synthesized
QVQLQESGGGLVQAGGSLRLSCAASGYIFLGAYMGWYRQAPGKERELVATIAPGSTTYYADSVKGRFTISRDNAKNTVYLQMNSLKPEDTAVYYCAVGATRDWLLYDYWGQGTQVTVSS

SEQ ID NO: 42458 - protein, 121 aa, Artificial Sequence
  Chemically Synthesized
QVQLQESGGGLVQAGGSLRLSCAASGTIFDNWVMGWYRQAPGKERELVASMVLVLLPYADSVKGRFTISRDNAKNTVYLQMNSLKPEDTAVYYCAVVSDPARDGSEGHDYWGQGTQVTVSS

SEQ ID NO: 42459 - protein, 122 aa, Artificial Sequence
  Chemically Synthesized
QVQLQESGGGLVQAGGSLRLSCAASGSISYNVPMGWYRQAPGKEREFVATISAGANTYYADSVKGRFTISRDNAKNTVYLQMNSLKPEDTAVYYCAVYGHYDYTVGHQLGYWGQGTQVTVSS

SEQ ID NO: 42460 - protein, 121 aa, Artificial Sequence
  Chemically Synthesized
QVQLQESGGGLVQAGGSLRLSCAASGSISDLSMGWYRQAPGKERELVAGITYGTNTYYADSVKGRFTISRDNAKNTVYLQMNSLKPEDTAVYYCAVIDVDDTGHDVIFYYWGQGTQVTVSS

SEQ ID NO: 42461 - protein, 116 aa, Artificial Sequence
  Chemically Synthesized
QVQLQESGGGLVQAGGSLRLSCAASGYISELLMGWYRQAPGKEREFVASIGGGGTTYYADSVKGRFTISRDNAKNTVYLQMNSLKPEDTAVYYCAAPEVTYYRYYWGQGTQVTVSS

SEQ ID NO: 42462 - protein, 122 aa, Artificial Sequence
  Chemically Synthesized
QVQLQESGGGLVQAGGSLRLSCAASGSIFVPNSMGWYRQAPGKERELVATISHGGSTNYADSVKGRFTISRDNAKNTVYLQMNSLKPEDTAVYYCAVFANAGEEAEFIHYYWGQGTQVTVSS

SEQ ID NO: 42463 - protein, 122 aa, Artificial Sequence
  Chemically Synthesized
QVQLQESGGGLVQAGGSLRLSCAASGNISWRYIMGWYRQAPGKERELVAAIDVGGITNYADSVKGRFTISRDNAKNTVYLQMNSLKPEDTAVYYCAAGTYWIYLGWTYHGYWGQGTQVTVSS

SEQ ID NO: 42464 - protein, 122 aa, Artificial Sequence
  Chemically Synthesized
QVQLQESGGGLVQAGGSLRLSCAASGSISDSGVMGWYRQAPGKERELVAAIGRGSNTYYADSVKGRFTISRDNAKNTVYLQMNSLKPEDTAVYYCAATDVDIVLEAVGHDYWGQGTQVTVSS

SEQ ID NO: 42465 - protein, 116 aa, Artificial Sequence
  Chemically Synthesized
QVQLQESGGGLVQAGGSLRLSCAASGTISDGLYMGWYRQAPGKEREFVATIAHGSSTYYADSVKGRFTISRDNAKNTVYLQMNSLKPEDTAVYYCAASSGTNGIYWGQGTQVTVSS

SEQ ID NO: 42466 - protein, 122 aa, Artificial Sequence
  Chemically Synthesized
QVQLQESGGGLVQAGGSLRLSCAASGNISDDAFMGWYRQAPGKERELVATISYGSTTYYADSVKGRFTISRDNAKNTVYLQMNSLKPEDTAVYYCAVTYDSVPYSLTGYSYWGQGTQVTVSS

SEQ ID NO: 42467 - protein, 122 aa, Artificial Sequence
  Chemically Synthesized
QVQLQESGGGLVQAGGSLRLSCAASGNISGLDAMGWYRQAPGKERELVATIDLGGSTYYADSVKGRFTISRDNAKNTVYLQMNSLKPEDTAVYYCAADYYSWYAPGYYHNYWGQGTQVTVSS

SEQ ID NO: 42468 - protein, 126 aa, Artificial Sequence
  Chemically Synthesized
QVQLQESGGGLVQAGGSLRLSCAASGTISNQRTMGWYRQAPGKERELVAAISYGTTTNYADSVKGRFTISRDNAKNTVYLQMNSLKPEDTAVYYCAVQNYGSIVLRGHYDDGHHYWGQGTQVTVSS

SEQ ID NO: 42469 - protein, 116 aa, Artificial Sequence
  Chemically Synthesized
QVQLQESGGGLVQAGGSLRLSCAASGTLTLTMGWYRQAPGKEREFVAGIGLGAITYYADSVKGRFTISRDNAKNTVYLQMNSLKPEDTAVYYCAAGTTPATALLYWGQGTQVTVSS

SEQ ID NO: 42470 - protein, 122 aa, Artificial Sequence
  Chemically Synthesized
QVQLQESGGGLVQAGGSLRLSCAASGSISDLGDMGWYRQAPGKEREFVAAIGWGASTNYADSVKGRFTISRDNAKNTVYLQMNSLKPEDTAVYYCAVIRGPLDYRKAYHFYWGQGTQVTVSS

SEQ ID NO: 42471 - protein, 127 aa, Artificial Sequence
  Chemically Synthesized
QVQLQESGGGLVQAGGSLRLSCAASGTIFFIPYMGWYRQAPGKERELVATIDWGSSTYYADSVKGRFTISRDNAKNTVYLQMNSLKPEDTAVYYCAAYHGSVSSRLLLGTTTWTMYWGQGTQVTVSS

SEQ ID NO: 42472 - protein, 117 aa, Artificial Sequence
  Chemically Synthesized
QVQLQESGGGLVQAGGSLRLSCAASGTISRPTDMGWYRQAPGKERELVATIMLVLIPYADSVKGRFTISRDNAKNTVYLQMNSLKPEDTAVYYCAVRPLYYRAYWYWGQGTQVTVSS

SEQ ID NO: 42473 - protein, 113 aa, Artificial Sequence
  Chemically Synthesized
QVQLQESGGGLVQAGGSLRLSCAASGSISYSGTMGWYRQAPGKEREFVAAIGVGTITYYADSVKGRFTISRDNAKNTVYLQMNSLKPEDTAVYYCAYSFYPYWGQGTQVTVSS

SEQ ID NO: 42474 - protein, 122 aa, Artificial Sequence
  Chemically Synthesized
QVQLQESGGGLVQAGGSLRLSCAASGNISRRIYMGWYRQAPGKERELVATIARGANTYYADSVKGRFTISRDNAKNTVYLQMNSLKPEDTAVYYCAVVGDLSSWGRYFYAYWGQGTQVTVSS

SEQ ID NO: 42475 - protein, 118 aa, Artificial Sequence
  Chemically Synthesized
QVQLQESGGGLVQAGGSLRLSCAASGSIFYIGYMGWYRQAPGKERELVASISRGSNTNYADSVKGRFTISRDNAKNTVYLQMNSLKPEDTAVYYCAAVFYTYQAHYYWGQGTQVTVSS

SEQ ID NO: 42476 - protein, 121 aa, Artificial Sequence
  Chemically Synthesized
QVQLQESGGGLVQAGGSLRLSCAASGYISAVSMGWYRQAPGKERELVASISDGANTNYADSVKGRFTISRDNAKNTVYLQMNSLKPEDTAVYYCAAEYYGRADEDFALVYWGQGTQVTVSS

SEQ ID NO: 42477 - protein, 122 aa, Artificial Sequence
  Chemically Synthesized
QVQLQESGGGLVQAGGSLRLSCAASGYIFPEDYMGWYRQAPGKERELVAGITSGSITNYADSVKGRFTISRDNAKNTVYLQMNSLKPEDTAVYYCAAESYAGNIQDWTHQYWGQGTQVTVSS

SEQ ID NO: 42478 - protein, 122 aa, Artificial Sequence
  Chemically Synthesized
QVQLQESGGGLVQAGGSLRLSCAASGYISGRYRMGWYRQAPGKERELVAAIGDGSTTYYADSVKGRFTISRDNAKNTVYLQMNSLKPEDTAVYYCAVEGPSNGTRNNYHYYWGQGTQVTVSS

SEQ ID NO: 42479 - protein, 118 aa, Artificial Sequence
  Chemically Synthesized
QVQLQESGGGLVQAGGSLRLSCAASGYISDVAAMGWYRQAPGKEREFVATIGYGTITNYADSVKGRFTISRDNAKNTVYLQMNSLKPEDTAVYYCAAVVIGGVAFRYWGQGTQVTVSS

SEQ ID NO: 42480 - protein, 118 aa, Artificial Sequence
  Chemically Synthesized
QVQLQESGGGLVQAGGSLRLSCAASGYISGQGYMGWYRQAPGKEREFVAAIDDRWYYQYADSVKGRFTISRDNAKNTVYLQMNSLKPEDTAVYYCAVVYQYGVAHYYWGQGTQVTVSS

SEQ ID NO: 42481 - protein, 118 aa, Artificial Sequence
  Chemically Synthesized
QVQLQESGGGLVQAGGSLRLSCAASGNISPADYMGWYRQAPGKERELVASIASGAITYYADSVKGRFTISRDNAKNTVYLQMNSLKPEDTAVYYCAAAGYENYRHIYWGQGTQVTVSS

SEQ ID NO: 42482 - protein, 121 aa, Artificial Sequence
  Chemically Synthesized
QVQLQESGGGLVQAGGSLRLSCAASGSISDSYYMGWYRQAPGKERELVASIAYGASTYYADSVKGRFTISRDNAKNTVYLQMNSLKPEDTAVYYCAAATTDQVRQYRHYYWGQGTQVTVSS

SEQ ID NO: 42483 - protein, 118 aa, Artificial Sequence
  Chemically Synthesized
QVQLQESGGGLVQAGGSLRLSCAASGSISDGDYMGWYRQAPGKEREFVASINYGANTYYADSVKGRFTISRDNAKNTVYLQMNSLKPEDTAVYYCAAAGYENYRHIYWGQGTQVTVSS

SEQ ID NO: 42484 - protein, 118 aa, Artificial Sequence
  Chemically Synthesized
QVQLQESGGGLVQAGGSLRLSCAASGSIFDSVYMGWYRQAPGKEREFVASISLGGTTYYADSVKGRFTISRDNAKNTVYLQMNSLKPEDTAVYYCAAGAGGRSDHIYWGQGTQVTVSS

SEQ ID NO: 42485 - protein, 118 aa, Artificial Sequence
  Chemically Synthesized
QVQLQESGGGLVQAGGSLRLSCAASGNIFGIRYMGWYRQAPGKEREFVASIAGGGTTYYADSVKGRFTISRDNAKNTVYLQMNSLKPEDTAVYYCAAAGYENYRHIYWGQGTQVTVSS

SEQ ID NO: 42486 - protein, 121 aa, Artificial Sequence
  Chemically Synthesized
QVQLQESGGGLVQAGGSLRLSCAASGTISDPHHMGWYRQAPGKEREFVAAITDGSSTYYADSVKGRFTISRDNAKNTVYLQMNSLKPEDTAVYYCAYVPSKYVTSSPHYYWGQGTQVTVSS

SEQ ID NO: 42487 - protein, 121 aa, Artificial Sequence
  Chemically Synthesized
QVQLQESGGGLVQAGGSLRLSCAASGTISGIAYMGWYRQAPGKEREFVAAITRGSTTYYADSVKGRFTISRDNAKNTVYLQMNSLKPEDTAVYYCAASTDANVRNPVYYYWGQGTQVTVSS

SEQ ID NO: 42488 - protein, 118 aa, Artificial Sequence
  Chemically Synthesized
QVQLQESGGGLVQAGGSLRLSCAASGTISPLVYMGWYRQAPGKEREFVASITTGATTYYADSVKGRFTISRDNAKNTVYLQMNSLKPEDTAVYYCAASNYVDPSFYYWGQGTQVTVSS

SEQ ID NO: 42489 - protein, 121 aa, Artificial Sequence
  Chemically Synthesized
QVQLQESGGGLVQAGGSLRLSCAASGNIFQSIYMGWYRQAPGKERELVASISVGSNTYYADSVKGRFTISRDNAKNTVYLQMNSLKPEDTAVYYCAAADVRYLARVEHYYWGQGTQVTVSS

SEQ ID NO: 42490 - protein, 118 aa, Artificial Sequence
  Chemically Synthesized
QVQLQESGGGLVQAGGSLRLSCAASGSISDGDYMGWYRQAPGKEREFVASINYGANTYYADSVKGRFTISRDNAKNTVYLQMNSLKPEDTAVYYCAAAAYLDVIHVYWGQGTQVTVSS

SEQ ID NO: 42491 - protein, 122 aa, Artificial Sequence
  Chemically Synthesized
QVQLQESGGGLVQAGGSLRLSCAASGNIFLPLYMGWYRQAPGKERELVASISRGGTTYYADSVKGRFTISRDNAKNTVYLQMNSLKPEDTAVYYCAVAADAQDARRIEHYYWGQGTQVTVSS

SEQ ID NO: 42492 - protein, 126 aa, Artificial Sequence
  Chemically Synthesized
QVQLQESGGGLVQAGGSLRLSCAASGNISRGLYMGWYRQAPGKERELVASINDGANTYYADSVKGRFTISRDNAKNTVYLQMNSLKPEDTAVYYCAAQDIDVVEAYHDVVYGLIYWGQGTQVTVSS

SEQ ID NO: 42493 - protein, 118 aa, Artificial Sequence
  Chemically Synthesized
QVQLQESGGGLVQAGGSLRLSCAASGTIFNWTYMGWYRQAPGKERELVASINRGANTYYADSVKGRFTISRDNAKNTVYLQMNSLKPEDTAVYYCAVSARTRGDHPYWGQGTQVTVSS

SEQ ID NO: 42494 - protein, 121 aa, Artificial Sequence
  Chemically Synthesized
QVQLQESGGGLVQAGGSLRLSCAASGNIFRDVYMGWYRQAPGKERELVASINNGASTYYADSVKGRFTISRDNAKNTVYLQMNSLKPEDTAVYYCAVVDTEYLYYLTYYYWGQGTQVTVSS

SEQ ID NO: 42495 - protein, 118 aa, Artificial Sequence
  Chemically Synthesized
QVQLQESGGGLVQAGGSLRLSCAASGTISAIDYMGWYRQAPGKERELVASINSGAITYYADSVKGRFTISRDNAKNTVYLQMNSLKPEDTAVYYCAVTYLGHPTLNYWGQGTQVTVSS

SEQ ID NO: 42496 - protein, 118 aa, Artificial Sequence
  Chemically Synthesized
QVQLQESGGGLVQAGGSLRLSCAASGNISADYYMGWYRQAPGKEREFVAGIGPGSITYYADSVKGRFTISRDNAKNTVYLQMNSLKPEDTAVYYCAASRRSDPNLGYWGQGTQVTVSS

SEQ ID NO: 42497 - protein, 115 aa, Artificial Sequence
  Chemically Synthesized
QVQLQESGGGLVQAGGSLRLSCAASGSIFYDYYMGWYRQAPGKEREFVASIDLGGNTYYADSVKGRFTISRDNAKNTVYLQMNSLKPEDTAVYYCAAESGVLAYWGQGTQVTVSS

SEQ ID NO: 42498 - protein, 121 aa, Artificial Sequence
  Chemically Synthesized
QVQLQESGGGLVQAGGSLRLSCAASGTISDDDYMGWYRQAPGKERELVAAIGAGTSTNYADSVKGRFTISRDNAKNTVYLQMNSLKPEDTAVYYCAAVRVGAVYSVRHYYWGQGTQVTVSS

SEQ ID NO: 42499 - protein, 119 aa, Artificial Sequence
  Chemically Synthesized
QVQLQESGGGLVQAGGSLRLSCAASGNISYAYMGWYRQAPGKERELVAAISPGANTYYADSVKGRFTISRDNAKNTVYLQMNSLKPEDTAVYYCAASNGDVRDAAHYYWGQGTQVTVSS

SEQ ID NO: 42500 - protein, 122 aa, Artificial Sequence
  Chemically Synthesized
QVQLQESGGGLVQAGGSLRLSCAASGSISDYPYMGWYRQAPGKERELVASISQGSSTYYADSVKGRFTISRDNAKNTVYLQMNSLKPEDTAVYYCAAVVATQLIYHPDHYYWGQGTQVTVSS

SEQ ID NO: 42501 - protein, 118 aa, Artificial Sequence
  Chemically Synthesized
QVQLQESGGGLVQAGGSLRLSCAASGTISNPRAMGWYRQAPGKEREFVAGIASGSSTYYADSVKGRFTISRDNAKNTVYLQMNSLKPEDTAVYYCAVYYYDQGWYGYWGQGTQVTVSS

SEQ ID NO: 42502 - protein, 121 aa, Artificial Sequence
  Chemically Synthesized
QVQLQESGGGLVQAGGSLRLSCAASGYISTDDYMGWYRQAPGKEREFVASIGDGASTNYADSVKGRFTISRDNAKNTVYLQMNSLKPEDTAVYYCAAVSVLYVRYAQAYYWGQGTQVTVSS

SEQ ID NO: 42503 - protein, 118 aa, Artificial Sequence
  Chemically Synthesized
QVQLQESGGGLVQAGGSLRLSCAASGNISPFTYMGWYRQAPGKEREFVASIASGSITYYADSVKGRFTISRDNAKNTVYLQMNSLKPEDTAVYYCAVSYYSDVVFYYWGQGTQVTVSS

SEQ ID NO: 42504 - protein, 122 aa, Artificial Sequence
  Chemically Synthesized
QVQLQESGGGLVQAGGSLRLSCAASGNIFYVAYMGWYRQAPGKEREFVASITYGANTYYADSVKGRFTISRDNAKNTVYLQMNSLKPEDTAVYYCAVVDDGSRVRDVVHYYWGQGTQVTVSS

SEQ ID NO: 42505 - protein, 118 aa, Artificial Sequence
  Chemically Synthesized
QVQLQESGGGLVQAGGSLRLSCAASGSISDSYYMGWYRQAPGKERELVASIAYGASTYYADSVKGRFTISRDNAKNTVYLQMNSLKPEDTAVYYCAAAGYDNYRHIYWGQGTQVTVSS

SEQ ID NO: 42506 - protein, 119 aa, Artificial Sequence
  Chemically Synthesized
QVQLQESGGGLVQAGGSLRLSCAASGNIFGLVNMGWYRQAPGKEREFVATITGNGTITNYADSVKGRFTISRDNAKNTVYLQMNSLKPEDTAVYYCAVPHELWTVYAYWGQGTQVTVSS

SEQ ID NO: 42507 - protein, 118 aa, Artificial Sequence
  Chemically Synthesized
QVQLQESGGGLVQAGGSLRLSCAASGSISDSYYMGWYRQAPGKERELVASIAYGASTYYADSVKGRFTISRDNAKNTVYLQMNSLKPEDTAVYYCAAAGYEHYRHIYWGQGTQVTVSS

SEQ ID NO: 42508 - protein, 126 aa, Artificial Sequence
  Chemically Synthesized
QVQLQESGGGLVQAGGSLRLSCAASGTIFWHVAMGWYRQAPGKERELVATINDGANTYYADSVKGRFTISRDNAKNTVYLQMNSLKPEDTAVYYCAAYPIWRENVLQAVYTYLFYWGQGTQVTVSS

SEQ ID NO: 42509 - protein, 114 aa, Artificial Sequence
  Chemically Synthesized
QVQLQESGGGLVQAGGSLRLSCAASGYISNESMGWYRQAPGKEREFVATIADGSTTNYADSVKGRFTISRDNAKNTVYLQMNSLKPEDTAVYYCAGRLLLFWYWGQGTQVTVSS

SEQ ID NO: 42510 - protein, 117 aa, Artificial Sequence
  Chemically Synthesized
QVQLQESGGGLVQAGGSLRLSCAASGNIFDVSIMGWYRQAPGKERELVASITSGGTTYYADSVKGRFTISRDNAKNTVYLQMNSLKPEDTAVYYCAAYLRHYESFYWGQGTQVTVSS

SEQ ID NO: 42511 - protein, 109 aa, Artificial Sequence
  Chemically Synthesized
QVQLQESGGGLVQAGGSLRLSCAASGTIFRSTMGWYRQAPGKERELVAAIDAGGNTYYADSVKGRFTISRDNAKNTVYLQMNSLKPEDTAVYYCAATYWGQGTQVTVSS

SEQ ID NO: 42512 - protein, 117 aa, Artificial Sequence
  Chemically Synthesized
QVQLQESGGGLVQAGGSLRLSCAASGSISTSVMGWYRQAPGKERELVASIGVGSITNYADSVKGRFTISRDNAKNTVYLQMNSLKPEDTAVYYCAVPTRQSKPLWYWGQGTQVTVSS

SEQ ID NO: 42513 - protein, 109 aa, Artificial Sequence
  Chemically Synthesized
QVQLQESGGGLVQAGGSLRLSCAASGTISYDYGMGWYRQAPGKERELVAGIAYGSNTNYADSVKGRFTISRDNAKNTVYLQMNSLKPEDTAVYYCAFYWGQGTQVTVSS

SEQ ID NO: 42514 - protein, 118 aa, Artificial Sequence
  Chemically Synthesized
QVQLQESGGGLVQAGGSLRLSCAASGNIFVSPWMGWYRQAPGKEREFVAAINQGSTTNYADSVKGRFTISRDNAKNTVYLQMNSLKPEDTAVYYCAVTLAPDVGLGYWGQGTQVTVSS

SEQ ID NO: 42515 - protein, 118 aa, Artificial Sequence
  Chemically Synthesized
QVQLQESGGGLVQAGGSLRLSCAASGYISQAWVMGWYRQAPGKEREFVATITDGASTNYADSVKGRFTISRDNAKNTVYLQMNSLKPEDTAVYYCAVGSWYDTVHYYWGQGTQVTVSS

SEQ ID NO: 42516 - protein, 121 aa, Artificial Sequence
  Chemically Synthesized
QVQLQESGGGLVQAGGSLRLSCAASGYISPWGFMGWYRQAPGKEREFVASIGQYADSVKGRFTISRDNAKNTVYLQMNSLKPEDTAVYYCAATLDYYLYYGYIHAYVYTYWGQGTQVTVSS

SEQ ID NO: 42517 - protein, 118 aa, Artificial Sequence
  Chemically Synthesized
QVQLQESGGGLVQAGGSLRLSCAASGSIFAQSTMGWYRQAPGKEREFVATIDGGTTTNYADSVKGRFTISRDNAKNTVYLQMNSLKPEDTAVYYCAVEPSPIVYYDYWGQGTQVTVSS

SEQ ID NO: 42518 - protein, 117 aa, Artificial Sequence
  Chemically Synthesized
QVQLQESGGGLVQAGGSLRLSCAASGNIFGPVRMGWYRQAPGKEREFVAAIANGGTTYYADSVKGRFTISRDNAKNTVYLQMNSLKPEDTAVYYCAAYQQRSWTIYWGQGTQVTVSS

SEQ ID NO: 42519 - protein, 117 aa, Artificial Sequence
  Chemically Synthesized
QVQLQESGGGLVQAGGSLRLSCAASGTIFPVLDMGWYRQAPGKEREFVATIAPGGNTYYADSVKGRFTISRDNAKNTVYLQMNSLKPEDTAVYYCAVANIDKSQFYWGQGTQVTVSS

SEQ ID NO: 42520 - protein, 118 aa, Artificial Sequence
  Chemically Synthesized
QVQLQESGGGLVQAGGSLRLSCAASGNISLWYVMGWYRQAPGKEREFVAAITGGGNTYYADSVKGRFTISRDNAKNTVYLQMNSLKPEDTAVYYCAAFSRGWWPHAYWGQGTQVTVSS

SEQ ID NO: 42521 - protein, 122 aa, Artificial Sequence
  Chemically Synthesized
QVQLQESGGGLVQAGGSLRLSCAASGTISANLVMGWYRQAPGKERELVASIAYGSNTYYADSVKGRFTISRDNAKNTVYLQMNSLKPEDTAVYYCAVNVYEDGPGDEAYPYWGQGTQVTVSS

SEQ ID NO: 42522 - protein, 122 aa, Artificial Sequence
  Chemically Synthesized
QVQLQESGGGLVQAGGSLRLSCAASGSISYGYSMGWYRQAPGKERELVATIGTGGSTYYADSVKGRFTISRDNAKNTVYLQMNSLKPEDTAVYYCAVLYPLDYYSASVYVYWGQGTQVTVSS

SEQ ID NO: 42523 - protein, 122 aa, Artificial Sequence
  Chemically Synthesized
QVQLQESGGGLVQAGGSLRLSCAASGYISPRISMGWYRQAPGKERELVATIAHGGNTYYADSVKGRFTISRDNAKNTVYLQMNSLKPEDTAVYYCAAYVNWYTDEYYDHSYWGQGTQVTVSS

SEQ ID NO: 42524 - protein, 126 aa, Artificial Sequence
  Chemically Synthesized
QVQLQESGGGLVQAGGSLRLSCAASGNISHSPYMGWYRQAPGKEREFVAAIDIGGSTYYADSVKGRFTISRDNAKNTVYLQMNSLKPEDTAVYYCAAYRVAPSPQQHGGADGFVYWGQGTQVTVSS

SEQ ID NO: 42525 - protein, 118 aa, Artificial Sequence
  Chemically Synthesized
QVQLQESGGGLVQAGGSLRLSCAASGSIFDYWSMGWYRQAPGKEREFVASIGPGTTTNYADSVKGRFTISRDNAKNTVYLQMNSLKPEDTAVYYCAVTFPFAGQLRYWGQGTQVTVSS

SEQ ID NO: 42526 - protein, 118 aa, Artificial Sequence
  Chemically Synthesized
QVQLQESGGGLVQAGGSLRLSCAASGTISLTILMGWYRQAPGKERELVATISAGGITYYADSVKGRFTISRDNAKNTVYLQMNSLKPEDTAVYYCAVPDQPITYHFYWGQGTQVTVSS

SEQ ID NO: 42527 - protein, 121 aa, Artificial Sequence
  Chemically Synthesized
QVQLQESGGGLVQAGGSLRLSCAASGTISEHEYMGWYRQAPGKERELVAAITRGANTYYADSVKGRFTISRDNAKNTVYLQMNSLKPEDTAVYYCAAPTQAFPASLVTIYWGQGTQVTVSS

SEQ ID NO: 42528 - protein, 118 aa, Artificial Sequence
  Chemically Synthesized
QVQLQESGGGLVQAGGSLRLSCAASGNIFNNPYMGWYRQAPGKEREFVATIATGASTNYADSVKGRFTISRDNAKNTVYLQMNSLKPEDTAVYYCAAGGNDRLIFRYWGQGTQVTVSS

SEQ ID NO: 42529 - protein, 118 aa, Artificial Sequence
  Chemically Synthesized
QVQLQESGGGLVQAGGSLRLSCAASGNIFQLYKMGWYRQAPGKERELVASIASGANTYYADSVKGRFTISRDNAKNTVYLQMNSLKPEDTAVYYCAVNSYDTVTYYYWGQGTQVTVSS

SEQ ID NO: 42530 - protein, 118 aa, Artificial Sequence
  Chemically Synthesized
QVQLQESGGGLVQAGGSLRLSCAASGTISQLVYMGWYRQAPGKEREFVASIASGGNTNYADSVKGRFTISRDNAKNTVYLQMNSLKPEDTAVYYCAVIDTLRAPHGYWGQGTQVTVSS

SEQ ID NO: 42531 - protein, 118 aa, Artificial Sequence
  Chemically Synthesized
QVQLQESGGGLVQAGGSLRLSCAASGSISWPGRMGWYRQAPGKERELVATISTGTNTYYADSVKGRFTISRDNAKNTVYLQMNSLKPEDTAVYYCAAEAPAYSTHWYWGQGTQVTVSS

SEQ ID NO: 42532 - protein, 118 aa, Artificial Sequence
  Chemically Synthesized
QVQLQESGGGLVQAGGSLRLSCAASGYISYRPRMGWYRQAPGKEREFVAAINDGAITNYADSVKGRFTISRDNAKNTVYLQMNSLKPEDTAVYYCAAYTGRWIGYRYWGQGTQVTVSS

SEQ ID NO: 42533 - protein, 116 aa, Artificial Sequence
  Chemically Synthesized
QVQLQESGGGLVQAGGSLRLSCAASGSMGWYRQAPGKERELVAAIGTGGTTNYADSVKGRFTISRDNAKNTVYLQMNSLKPEDTAVYYCAVDRYYYGYYVRDYWYWGQGTQVTVSS

SEQ ID NO: 42534 - protein, 126 aa, Artificial Sequence
  Chemically Synthesized
QVQLQESGGGLVQAGGSLRLSCAASGSISRDERMGWYRQAPGKEREFVAAIDDGTITYYADSVKGRFTISRDNAKNTVYLQMNSLKPEDTAVYYCAAVWKDDITGGFITPAGHDYWGQGTQVTVSS

SEQ ID NO: 42535 - protein, 119 aa, Artificial Sequence
  Chemically Synthesized
QVQLQESGGGLVQAGGSLRLSCAASGTIFGSYGMGWYRQAPGKERELVASIAPGAIPYADSVKGRFTISRDNAKNTVYLQMNSLKPEDTAVYYCAAGRADQDRPDHAYWGQGTQVTVSS

SEQ ID NO: 42536 - protein, 125 aa, Artificial Sequence
  Chemically Synthesized
QVQLQESGGGLVQAGGSLRLSCAASGSISTDTLMGWYRQAPGKERELVATIDSGSNPYADSVKGRFTISRDNAKNTVYLQMNSLKPEDTAVYYCAVDYFVDWWSSGDALGEHGYWGQGTQVTVSS

SEQ ID NO: 42537 - protein, 121 aa, Artificial Sequence
  Chemically Synthesized
QVQLQESGGGLVQAGGSLRLSCAASGTIFYDGYMGWYRQAPGKERELVAAIDYGGTTNYADSVKGRFTISRDNAKNTVYLQMNSLKPEDTAVYYCAATTTLVLICRLTMYWGQGTQVTVSS

SEQ ID NO: 42538 - protein, 117 aa, Artificial Sequence
  Chemically Synthesized
QVQLQESGGGLVQAGGSLRLSCAASGTIFPYYMGWYRQAPGKERELVAGITAGAITNYADSVKGRFTISRDNAKNTVYLQMNSLKPEDTAVYYCAADTRDIGGHLYWGQGTQVTVSS

SEQ ID NO: 42539 - protein, 117 aa, Artificial Sequence
  Chemically Synthesized
QVQLQESGGGLVQAGGSLRLSCAASGTISSYGGMGWYRQAPGKERELLPVLVLVVIPYADSVKGRFTISRDNAKNTVYLQMNSLKPEDTAVYYCAAWSDGGQPLYYWGQGTQVTVSS

SEQ ID NO: 42540 - protein, 118 aa, Artificial Sequence
  Chemically Synthesized
QVQLQESGGGLVQAGGSLRLSCAASGTISEVLRMGWYRQAPGKERELVASIDDGATTNYADSVKGRFTISRDNAKNTVYLQMNSLKPEDTAVYYCAADSKQDGNFAYWGQGTQVTVSS

SEQ ID NO: 42541 - protein, 118 aa, Artificial Sequence
  Chemically Synthesized
QVQLQESGGGLVQAGGSLRLSCAASGTISDDAYMGWYRQAPGKEREFVAGIGDGTTTNYADSVKGRFTISRDNAKNTVYLQMNSLKPEDTAVYYCAVGASRSYYFGYWGQGTQVTVSS

SEQ ID NO: 42542 - protein, 121 aa, Artificial Sequence
  Chemically Synthesized
QVQLQESGGGLVQAGGSLRLSCAASGTISYTAMGWYRQAPGKERELVATISKGGSTYYADSVKGRFTISRDNAKNTVYLQMNSLKPEDTAVYYCAVRLGLQADAIYSHYYWGQGTQVTVSS

SEQ ID NO: 42543 - protein, 118 aa, Artificial Sequence
  Chemically Synthesized
QVQLQESGGGLVQAGGSLRLSCAASGNISTYDYMGWYRQAPGKERELVATIDAGAITNYADSVKGRFTISRDNAKNTVYLQMNSLKPEDTAVYYCAVANYNATGLYYWGQGTQVTVSS

SEQ ID NO: 42544 - protein, 118 aa, Artificial Sequence
  Chemically Synthesized
QVQLQESGGGLVQAGGSLRLSCAASGTIFLRDYMGWYRQAPGKEREFVASITSGSTTYYADSVKGRFTISRDNAKNTVYLQMNSLKPEDTAVYYCAVRARYGIGHTYWGQGTQVTVSS

SEQ ID NO: 42545 - protein, 117 aa, Artificial Sequence
  Chemically Synthesized
QVQLQESGGGLVQAGGSLRLSCAASGSIFGNFYMGWYRQAPGKEREFVALLLVVLIPYADSVKGRFTISRDNAKNTVYLQMNSLKPEDTAVYYCAAGIYGETQLPYWGQGTQVTVSS

SEQ ID NO: 42546 - protein, 118 aa, Artificial Sequence
  Chemically Synthesized
QVQLQESGGGLVQAGGSLRLSCAASGSISPFVYMGWYRQAPGKERELVAAIATGSITYYADSVKGRFTISRDNAKNTVYLQMNSLKPEDTAVYYCAVRTHRDTVHYYWGQGTQVTVSS

SEQ ID NO: 42547 - protein, 118 aa, Artificial Sequence
  Chemically Synthesized
QVQLQESGGGLVQAGGSLRLSCAASGYISVNSYMGWYRQAPGKEREFVASIAYGSSTNYADSVKGRFTISRDNAKNTVYLQMNSLKPEDTAVYYCAVDTGWQDTFYYWGQGTQVTVSS

SEQ ID NO: 42548 - protein, 117 aa, Artificial Sequence
  Chemically Synthesized
QVQLQESGGGLVQAGGSLRLSCAASGYISADSMGWYRQAPGKERELVATINSGTTTNYADSVKGRFTISRDNAKNTVYLQMNSLKPEDTAVYYCAAGNGVGPTHTYWGQGTQVTVSS

SEQ ID NO: 42549 - protein, 118 aa, Artificial Sequence
  Chemically Synthesized
QVQLQESGGGLVQAGGSLRLSCAASGNISYVYIMGWYRQAPGKERELVAGIAAGGSTYYADSVKGRFTISRDNAKNTVYLQMNSLKPEDTAVYYCAADYPSGGVHNYWGQGTQVTVSS

SEQ ID NO: 42550 - protein, 118 aa, Artificial Sequence
  Chemically Synthesized
QVQLQESGGGLVQAGGSLRLSCAASGNIFQYLGMGWYRQAPGKERELVATINTGGSTNYADSVKGRFTISRDNAKNTVYLQMNSLKPEDTAVYYCAVIYDDVSGHYYWGQGTQVTVSS

SEQ ID NO: 42551 - protein, 118 aa, Artificial Sequence
  Chemically Synthesized
QVQLQESGGGLVQAGGSLRLSCAASGNISRNDDMGWYRQAPGKEREFVATIAQGGSTNYADSVKGRFTISRDNAKNTVYLQMNSLKPEDTAVYYCAVGPAGYVYLTYWGQGTQVTVSS

SEQ ID NO: 42552 - protein, 121 aa, Artificial Sequence
  Chemically Synthesized
QVQLQESGGGLVQAGGSLRLSCAASGSIFGISDMGWYRQAPGKEREFVASIGYGTSTNYADSVKGRFTISRDNAKNTVYLQMNSLKPEDTAVYYCAVDQEIDSRRVVLMYWGQGTQVTVSS

SEQ ID NO: 42553 - protein, 118 aa, Artificial Sequence
  Chemically Synthesized
QVQLQESGGGLVQAGGSLRLSCAASGSIFLTRYMGWYRQAPGKERELVASITLGGITNYADSVKGRFTISRDNAKNTVYLQMNSLKPEDTAVYYCAVYLHYDDYHPYWGQGTQVTVSS

SEQ ID NO: 42554 - protein, 126 aa, Artificial Sequence
  Chemically Synthesized
QVQLQESGGGLVQAGGSLRLSCAASGTIFNVWYMGWYRQAPGKEREFVASINHGANTNYADSVKGRFTISRDNAKNTVYLQMNSLKPEDTAVYYCAAVTWYNQDRAIAYAFGLTYWGQGTQVTVSS

SEQ ID NO: 42555 - protein, 127 aa, Artificial Sequence
  Chemically Synthesized
QVQLQESGGGLVQAGGSLRLSCAASGTISSFGGSMGWYRQAPGKERELVAAIDYGGSTYYADSVKGRFTISRDNAKNTVYLQMNSLKPEDTAVYYCAAWRRETWINYYAGDGPHYYWGQGTQVTVSS

SEQ ID NO: 42556 - protein, 126 aa, Artificial Sequence
  Chemically Synthesized
QVQLQESGGGLVQAGGSLRLSCAASGTISGYYYMGWYRQAPGKEREFVAAIGYGTNTYYADSVKGRFTISRDNAKNTVYLQMNSLKPEDTAVYYCAVRYLGGYLEQAYHPEGHRYWGQGTQVTVSS

SEQ ID NO: 42557 - protein, 120 aa, Artificial Sequence
  Chemically Synthesized
QVQLQESGGGLVQAGGSLRLSCAASGTIFVVGYMGWYRQAPGKERELVAAIGPGTNTYYADSVKGRFTISRDNAKNTVYLQMNSLKPEDTAVYYCAADHTASPYFLPFYWGQGTQVTVSS

SEQ ID NO: 42558 - protein, 121 aa, Artificial Sequence
  Chemically Synthesized
QVQLQESGGGLVQAGGSLRLSCAASGISLYARMGWYRQAPGKERELVASINGGGNTYYADSVKGRFTISRDNAKNTVYLQMNSLKPEDTAVYYCAAVYFAQQYVIVQFRYWGQGTQVTVSS

SEQ ID NO: 42559 - protein, 118 aa, Artificial Sequence
  Chemically Synthesized
QVQLQESGGGLVQAGGSLRLSCAASGYIFPEDDMGWYRQAPGKEREFVATIDDGTTTYYADSVKGRFTISRDNAKNTVYLQMNSLKPEDTAVYYCAAYDRNTAYFGYWGQGTQVTVSS

SEQ ID NO: 42560 - protein, 123 aa, Artificial Sequence
  Chemically Synthesized
QVQLQESGGGLVQAGGSLRLSCAASGTISDAGGMGWYRQAPGKEREFVASINYGGTTYYADSVKGRFTISRDNAKNTVYLQMNSLKPEDTAVYYCAAGKLYYAGNYGLKHTYWGQGTQVTVSS

SEQ ID NO: 42561 - protein, 117 aa, Artificial Sequence
  Chemically Synthesized
QVQLQESGGGLVQAGGSLRLSCAASGTIFRKKGMGWYRQAPGKERELVAGIAGTITNYADSVKGRFTISRDNAKNTVYLQMNSLKPEDTAVYYCAALYYADYAFDYWGQGTQVTVSS

SEQ ID NO: 42562 - protein, 115 aa, Artificial Sequence
  Chemically Synthesized
QVQLQESGGGLVQAGGSLRLSCAASGTISAYHEMGWYRQAPGKEREFVASIDNGANTYYADSVKGRFTISRDNAKNTVYLQMNSLKPEDTAVYYCATRLTTLFYWGQGTQVTVSS

SEQ ID NO: 42563 - protein, 117 aa, Artificial Sequence
  Chemically Synthesized
QVQLQESGGGLVQAGGSLRLSCAASGSISTAGPMGWYRQAPGKEREFVATIADGGNTYADSVKGRFTISRDNAKNTVYLQMNSLKPEDTAVYYCAAYRYEWWWYDYWGQGTQVTVSS

SEQ ID NO: 42564 - protein, 122 aa, Artificial Sequence
  Chemically Synthesized
QVQLQESGGGLVQAGGSLRLSCAASGYIFGTIGMGWYRQAPGKEREFVAAIAYGGITYYADSVKGRFTISRDNAKNTVYLQMNSLKPEDTAVYYCAVGGSVYEFQAYYLVYWGQGTQVTVSS

SEQ ID NO: 42565 - protein, 118 aa, Artificial Sequence
  Chemically Synthesized
QVQLQESGGGLVQAGGSLRLSCAASGTIFYFIYMGWYRQAPGKERELVAGIDIGASTYYADSVKGRFTISRDNAKNTVYLQMNSLKPEDTAVYYCAVLRYYRAELYYWGQGTQVTVSS

SEQ ID NO: 42566 - protein, 121 aa, Artificial Sequence
  Chemically Synthesized
QVQLQESGGGLVQAGGSLRLSCAASGTIFPLNGMGWYRQAPGKERELVASISGGTTTYYADSVKGRFTISRDNAKNTVYLQMNSLKPEDTAVYYCAVTTTTTSTLSWNFYWGQGTQVTVSS

SEQ ID NO: 42567 - protein, 118 aa, Artificial Sequence
  Chemically Synthesized
QVQLQESGGGLVQAGGSLRLSCAASGTISARDIMGWYRQAPGKEREFVATIGPGASTNYADSVKGRFTISRDNAKNTVYLQMNSLKPEDTAVYYCAVQIVHRGQHAYWGQGTQVTVSS

SEQ ID NO: 42568 - protein, 121 aa, Artificial Sequence
  Chemically Synthesized
QVQLQESGGGLVQAGGSLRLSCAASGNILTLTMGWYRQAPGKERELVATIGEGGNTYYADSVKGRFTISRDNAKNTVYLQMNSLKPEDTAVYYCAAYGAKDAWSIRYYSYWGQGTQVTVSS

SEQ ID NO: 42569 - protein, 126 aa, Artificial Sequence
  Chemically Synthesized
QVQLQESGGGLVQAGGSLRLSCAASGTISDTSYMGWYRQAPGKERELVASITVGGNTYYADSVKGRFTISRDNAKNTVYLQMNSLKPEDTAVYYCAVYRAIYITYLHQDAYYHSYWGQGTQVTVSS

SEQ ID NO: 42570 - protein, 122 aa, Artificial Sequence
  Chemically Synthesized
QVQLQESGGGLVQAGGSLRLSCAASGSISYPRYMGWYRQAPGKERELVAAIGDGSITNYADSVKGRFTISRDNAKNTVYLQMNSLKPEDTAVYYCAVEYHSWWAGSYQFYYWGQGTQVTVSS

SEQ ID NO: 42571 - protein, 118 aa, Artificial Sequence
  Chemically Synthesized
QVQLQESGGGLVQAGGSLRLSCAASGTISEYNGMGWYRQAPGKEREFVATITYGGITNYADSVKGRFTISRDNAKNTVYLQMNSLKPEDTAVYYCAADSSRDQGHFYWGQGTQVTVSS

SEQ ID NO: 42572 - protein, 126 aa, Artificial Sequence
  Chemically Synthesized
QVQLQESGGGLVQAGGSLRLSCAASGYIFGRDYMGWYRQAPGKERELVATIADGANTNYADSVKGRFTISRDNAKNTVYLQMNSLKPEDTAVYYCAVPDHAGGIYWPEKNQHLDYWGQGTQVTVSS

SEQ ID NO: 42573 - protein, 122 aa, Artificial Sequence
  Chemically Synthesized
QVQLQESGGGLVQAGGSLRLSCAASGTIFRDTYMGWYRQAPGKERELVAAIGTGGTTYYADSVKGRFTISRDNAKNTVYLQMNSLKPEDTAVYYCAAGRRVQGIYGYVHGYWGQGTQVTVSS

SEQ ID NO: 42574 - protein, 122 aa, Artificial Sequence
  Chemically Synthesized
QVQLQESGGGLVQAGGSLRLSCAASGNISTYHHMGWYRQAPGKEREFVASISGGGTTYYADSVKGRFTISRDNAKNTVYLQMNSLKPEDTAVYYCAVFAAEYYDDLYDHSYWGQGTQVTVSS

SEQ ID NO: 42575 - protein, 118 aa, Artificial Sequence
  Chemically Synthesized
QVQLQESGGGLVQAGGSLRLSCAASGTISYGGVMGWYRQAPGKEREFVATIAAGATTNYADSVKGRFTISRDNAKNTVYLQMNSLKPEDTAVYYCAVYRTVYEGYDYWGQGTQVTVSS

SEQ ID NO: 42576 - protein, 117 aa, Artificial Sequence
  Chemically Synthesized
QVQLQESGGGLVQAGGSLRLSCAASGNISGDFDMGWYRQAPGKERELVATINVGTNTYYADSVKGRFTISRDNAKNTVYLQMNSLKPEDTAVYYCAVYIYGPSLFYWGQGTQVTVSS

SEQ ID NO: 42577 - protein, 124 aa, Artificial Sequence
  Chemically Synthesized
QVQLQESGGGLVQAGGSLRLSCAASGTIFYASVMGWYRQAPGKERELVAGISYGGTTYYADSVKGRFTISRDNAKNTVYLQMNSLKPEDTAVYYCAVGYYVGYPGGPYLQFRYWGQGTQVTVSS

SEQ ID NO: 42578 - protein, 118 aa, Artificial Sequence
  Chemically Synthesized
QVQLQESGGGLVQAGGSLRLSCAASGTIFSREYMGWYRQAPGKEREFVAAIAPGATTYYADSVKGRFTISRDNAKNTVYLQMNSLKPEDTAVYYCAVERLVLEFHYYWGQGTQVTVSS

SEQ ID NO: 42579 - protein, 126 aa, Artificial Sequence
  Chemically Synthesized
QVQLQESGGGLVQAGGSLRLSCAASGNIFARYWMGWYRQAPGKERELVASIDSGTITYYADSVKGRFTISRDNAKNTVYLQMNSLKPEDTAVYYCAVDDYTTPVQHGLPPQPYRYWGQGTQVTVSS

SEQ ID NO: 42580 - protein, 118 aa, Artificial Sequence
  Chemically Synthesized
QVQLQESGGGLVQAGGSLRLSCAASGNISYGQYMGWYRQAPGKERELVATITSGSNTYYADSVKGRFTISRDNAKNTVYLQMNSLKPEDTAVYYCAAYYTLLGWFWYWGQGTQVTVSS

SEQ ID NO: 42581 - protein, 118 aa, Artificial Sequence
  Chemically Synthesized
QVQLQESGGGLVQAGGSLRLSCAASGTISVYWDMGWYRQAPGKEREFVAAIAIGTTTNYADSVKGRFTISRDNAKNTVYLQMNSLKPEDTAVYYCAAYVDSRDFHQYWGQGTQVTVSS

SEQ ID NO: 42582 - protein, 126 aa, Artificial Sequence
  Chemically Synthesized
QVQLQESGGGLVQAGGSLRLSCAASGYIFRARYMGWYRQAPGKERELVATISSGSTTNYADSVKGRFTISRDNAKNTVYLQMNSLKPEDTAVYYCAVDRHIDKGNYAGEDRWLYYWGQGTQVTVSS

SEQ ID NO: 42583 - protein, 122 aa, Artificial Sequence
  Chemically Synthesized
QVQLQESGGGLVQAGGSLRLSCAASGYIFFAFIMGWYRQAPGKERELVGAIANGGTTYYADSVKGRFTISRDNAKNTVYLQMNSLKPEDTAVYYCAVLFTYGAPGYELHDYWGQGTQVTVSS

SEQ ID NO: 42584 - protein, 118 aa, Artificial Sequence
  Chemically Synthesized
QVQLQESGGGLVQAGGSLRLSCAASGNIFYTTHMGWYRQAPGKERELVATIDTGSTTNYADSVKGRFTISRDNAKNTVYLQMNSLKPEDTAVYYCAVQYPVYGSHYYWGQGTQVTVSS

SEQ ID NO: 42585 - protein, 117 aa, Artificial Sequence
  Chemically Synthesized
QVQLQESGGGLVQAGGSLRLSCAASGYIFRPYDMGWYRQAPGKERELVATISGGGSTNYADSVKGRFTISRDNAKNTVYLQMNSLKPEDTAVYYCAVSSLWLSLFYWGQGTQVTVSS

SEQ ID NO: 42586 - protein, 126 aa, Artificial Sequence
  Chemically Synthesized
QVQLQESGGGLVQAGGSLRLSCAASGNISPLGAMGWYRQAPGKEREFVAGISYGTTTYYADSVKGRFTISRDNAKNTVYLQMNSLKPEDTAVYYCAALHGTGGYNGYARVYHHYYWGQGTQVTVSS

SEQ ID NO: 42587 - protein, 126 aa, Artificial Sequence
  Chemically Synthesized
QVQLQESGGGLVQAGGSLRLSCAASGNISPRLPMGWYRQAPGKEREFVAGISYGSNTNYADSVKGRFTISRDNAKNTVYLQMNSLKPEDTAVYYCAAPYLEDLQIGDIIYPYFYYWGQGTQVTVSS

SEQ ID NO: 42588 - protein, 118 aa, Artificial Sequence
  Chemically Synthesized
QVQLQESGGGLVQAGGSLRLSCAASGNISTARWMGWYRQAPGKEREFVAAINAGTNTYYADSVKGRFTISRDNAKNTVYLQMNSLKPEDTAVYYCAVWYRRRAYHYYWGQGTQVTVSS

SEQ ID NO: 42589 - protein, 122 aa, Artificial Sequence
  Chemically Synthesized
QVQLQESGGGLVQAGGSLRLSCAASGNISYRHRMGWYRQAPGKERELVATIDPGGTTYYADSVKGRFTISRDNAKNTVYLQMNSLKPEDTAVYYCAAYRPGRAHSRERHEYWGQGTQVTVSS

SEQ ID NO: 42590 - protein, 126 aa, Artificial Sequence
  Chemically Synthesized
QVQLQESGGGLVQAGGSLRLSCAASGYIFDPSYMGWYRQAPGKEREFVAAIAYGTNTYYADSVKGRFTISRDNAKNTVYLQMNSLKPEDTAVYYCAADIYSRDDYDVGAYDIHTYWGQGTQVTVSS

SEQ ID NO: 42591 - protein, 112 aa, Artificial Sequence
  Chemically Synthesized
QVQLQESGGGLVQAGGSLRLSCAASGTMGWYRQAPGKERELVASITPGGITYYADSVKGRFTISRDNAKNTVYLQMNSLKPEDTAVYYCAAQPIFAAPHDYWGQGTQVTVSS

SEQ ID NO: 42592 - protein, 118 aa, Artificial Sequence
  Chemically Synthesized
QVQLQESGGGLVQAGGSLRLSCAASGSISLRTYMGWYRQAPGKERELVAAIDYGSTTNYADSVKGRFTISRDNAKNTVYLQMNSLKPEDTAVYYCAARYDLVGVLDYWGQGTQVTVSS

SEQ ID NO: 42593 - protein, 126 aa, Artificial Sequence
  Chemically Synthesized
QVQLQESGGGLVQAGGSLRLSCAASGSISERTYMGWYRQAPGKERELVAAIADGGITYYADSVKGRFTISRDNAKNTVYLQMNSLKPEDTAVYYCAVGAGSDQRWGYIYFLFHTYWGQGTQVTVSS

SEQ ID NO: 42594 - protein, 112 aa, Artificial Sequence
  Chemically Synthesized
QVQLQESGGGLVQAGGSLRLSCAASGSIFAYDTMGWYRQAPGKEREFVASIAPGANTYYADSVKGRFTISRDNAKNTVYLQMNSLKPEDTAVYYCAVHPFYWGQGTQVTVSS

SEQ ID NO: 42595 - protein, 119 aa, Artificial Sequence
  Chemically Synthesized
QVQLQESGGGLVQAGGSLRLSCAASGYIFYPDAMGWYRQAPGKERELVASISSGTNTYYADSVKGRFTISRDNAKNTVYLQMNSLKPEDTAVYYCAVSFLLLRTSIMYWGQGTQVTVSS

SEQ ID NO: 42596 - protein, 116 aa, Artificial Sequence
  Chemically Synthesized
QVQLQESGGGLVQAGGSLRLSCAASGLMGWYRQAPGKERELVAGIATGTTTNYADSVKGRFTISRDNAKNTVYLQMNSLKPEDTAVYYCAAYLYSDDSPYAGLYYWGQGTQVTVSS

SEQ ID NO: 42597 - protein, 113 aa, Artificial Sequence
  Chemically Synthesized
QVQLQESGGGLVQAGGSLRLSCAASGYIFAYYIMGWYRQAPGKERELVATISPGTSTNYADSVKGRFTISRDNAKNTVYLQMNSLKPEDTAVYYCAVYISQYWGQGTQVTVSS

SEQ ID NO: 42598 - protein, 118 aa, Artificial Sequence
  Chemically Synthesized
QVQLQESGGGLVQAGGSLRLSCAASGTIFDLQYMGWYRQAPGKEREFVAGISVGTNTNYADSVKGRFTISRDNAKNTVYLQMNSLKPEDTAVYYCAAKRYWIPLHYYWGQGTQVTVSS

SEQ ID NO: 42599 - protein, 117 aa, Artificial Sequence
  Chemically Synthesized
QVQLQESGGGLVQAGGSLRLSCAASGYISTMKMGWYRQAPGKERELVAAIGKGAITYYADSVKGRFTISRDNAKNTVYLQMNSLKPEDTAVYYCAVLVYPVLSHRYWGQGTQVTVSS

SEQ ID NO: 42600 - protein, 126 aa, Artificial Sequence
  Chemically Synthesized
QVQLQESGGGLVQAGGSLRLSCAASGYIFYPRIMGWYRQAPGKEREFVATIDYGAITYYADSVKGRFTISRDNAKNTVYLQMNSLKPEDTAVYYCAVYYVADYPVDRFDYGQFVYWGQGTQVTVSS

SEQ ID NO: 42601 - protein, 126 aa, Artificial Sequence
  Chemically Synthesized
QVQLQESGGGLVQAGGSLRLSCAASGSISNNAYMGWYRQAPGKERELVAAIAVGASTYYADSVKGRFTISRDNAKNTVYLQMNSLKPEDTAVYYCAAITAQVDHYWRLDGYYLDYWGQGTQVTVSS

SEQ ID NO: 42602 - protein, 122 aa, Artificial Sequence
  Chemically Synthesized
QVQLQESGGGLVQAGGSLRLSCAASGYIFRRRSMGWYRQAPGKERELVATINRGTNTNYADSVKGRFTISRDNAKNTVYLQMNSLKPEDTAVYYCAAGGYTDVLYSGWFRYWGQGTQVTVSS

SEQ ID NO: 42603 - protein, 126 aa, Artificial Sequence
  Chemically Synthesized
QVQLQESGGGLVQAGGSLRLSCAASGSISNEYLMGWYRQAPGKEREFVAAIGAGTTTYYADSVKGRFTISRDNAKNTVYLQMNSLKPEDTAVYYCAVSYPDQYYPGYVYKLYHEYWGQGTQVTVSS

SEQ ID NO: 42604 - protein, 117 aa, Artificial Sequence
  Chemically Synthesized
QVQLQESGGGLVQAGGSLRLSCAASGYIFDSLMGWYRQAPGKEREFVASIAHGSITYYADSVKGRFTISRDNAKNTVYLQMNSLKPEDTAVYYCAARDATVEPLGYWGQGTQVTVSS

SEQ ID NO: 42605 - protein, 126 aa, Artificial Sequence
  Chemically Synthesized
QVQLQESGGGLVQAGGSLRLSCAASGYISARSYMGWYRQAPGKERELVAGITRGANTYYADSVKGRFTISRDNAKNTVYLQMNSLKPEDTAVYYCAAFRYYDAHANPWWSWRHAYWGQGTQVTVSS

SEQ ID NO: 42606 - protein, 117 aa, Artificial Sequence
  Chemically Synthesized
QVQLQESGGGLVQAGGSLRLSCAASGIFFLTGMGWYRQAPGKERELVAGIDYGSSTNYADSVKGRFTISRDNAKNTVYLQMNSLKPEDTAVYYCAVNISDYTLHRYWGQGTQVTVSS

SEQ ID NO: 42607 - protein, 122 aa, Artificial Sequence
  Chemically Synthesized
QVQLQESGGGLVQAGGSLRLSCAASGNISSQILMGWYRQAPGKEREFVASIAYGTSTNYADSVKGRFTISRDNAKNTVYLQMNSLKPEDTAVYYCAVKSTPTSRAATPLGYWGQGTQVTVSS

SEQ ID NO: 42608 - protein, 118 aa, Artificial Sequence
  Chemically Synthesized
QVQLQESGGGLVQAGGSLRLSCAASGNISLPQIMGWYRQAPGKEREFVASIDDGGTTYYADSVKGRFTISRDNAKNTVYLQMNSLKPEDTAVYYCAAIYNAGSEYWYWGQGTQVTVSS

SEQ ID NO: 42609 - protein, 121 aa, Artificial Sequence
  Chemically Synthesized
QVQLQESGGGLVQAGGSLRLSCAASGYIFGPGRMGWYRQAPGKERELVATIDTGANTNYADSVKGRFTISRDNAKNTVYLQMNSLKPEDTAVYYCAVQYRDTGTGATFMYWGQGTQVTVSS

SEQ ID NO: 42610 - protein, 118 aa, Artificial Sequence
  Chemically Synthesized
QVQLQESGGGLVQAGGSLRLSCAASGNISLPQIMGWYRQAPGKEREFVASIDDGGTTYYADSVKGRFTISRDNAKNTVYLQMNSLKPEDTAVYYCAVDITYFYGFGYWGQGTQVTVSS

SEQ ID NO: 42611 - protein, 122 aa, Artificial Sequence
  Chemically Synthesized
QVQLQESGGGLVQAGGSLRLSCAASGNISLPQIMGWYRQAPGKEREFVASIDDGGTTYYADSVKGRFTISRDNAKNTVYLQMNSLKPEDTAVYYCAVALSDVDDSGYSHGYWGQGTQVTVSS

SEQ ID NO: 42612 - protein, 121 aa, Artificial Sequence
  Chemically Synthesized
QVQLQESGGGLVQAGGSLRLSCAASGTISGSWEMGWYRQAPGKEREFVASIAHGSTTYYADSVKGRFTISRDNAKNTVYLQMNSLKPEDTAVYYCAVQYRDTGTGATFMYWGQGTQVTVSS

SEQ ID NO: 42613 - protein, 121 aa, Artificial Sequence
  Chemically Synthesized
QVQLQESGGGLVQAGGSLRLSCAASGTISRPIEMGWYRQAPGKEREFVASIAYGTNTYYADSVKGRFTISRDNAKNTVYLQMNSLKPEDTAVYYCAVATRRYGDGLDYGYWGQGTQVTVSS

SEQ ID NO: 42614 - protein, 121 aa, Artificial Sequence
  Chemically Synthesized
QVQLQESGGGLVQAGGSLRLSCAASGNISLPQIMGWYRQAPGKEREFVASIDDGGTTYYADSVKGRFTISRDNAKNTVYLQMNSLKPEDTAVYYCAVQDRDTGTGATFMYWGQGTQVTVSS

SEQ ID NO: 42615 - protein, 122 aa, Artificial Sequence
  Chemically Synthesized
QVQLQESGGGLVQAGGSLRLSCAASGTISRDFLMGWYRQAPGKEREFVAAIGFGATTYYADSVKGRFTISRDNAKNTVYLQMNSLKPEDTAVYYCAVDLNDRFDDEYGYGYWGQGTQVTVSS

SEQ ID NO: 42616 - protein, 118 aa, Artificial Sequence
  Chemically Synthesized
QVQLQESGGGLVQAGGSLRLSCAASGNISLPQIMGWYRQAPGKERELVATIDTGANTNYADSVKGRFTISRDNAKNTVYLQMNSLKPEDTAVYYCAAIYNAGSEYWYWGQGTQVTVSS

SEQ ID NO: 42617 - protein, 115 aa, Artificial Sequence
  Chemically Synthesized
QVQLQESGGGLVQAGGSLRLSCAASGSISTPDNMGWYRQAPGKERELVATIGGGTNTNYADSVKGRFTISRDNAKNTVYLQMNSLKPEDTAVYYCAAQAYYYQYWGQGTQVTVSS

SEQ ID NO: 42618 - protein, 121 aa, Artificial Sequence
  Chemically Synthesized
QVQLQESGGGLVQAGGSLRLSCAASGYIFGPGRMGWYRQAPGKEREFVASIDDGGTTYYADSVKGRFTISRDNAKNTVYLQMNSLKPEDTAVYYCAVQYRDTGTGATFMYWGQGTQVTVSS

SEQ ID NO: 42619 - protein, 118 aa, Artificial Sequence
  Chemically Synthesized
QVQLQESGGGLVQAGGSLRLSCAASGYISFLRIMGWYRQAPGKEREFVAAIALGSNTYYADSVKGRFTISRDNAKNTVYLQMNSLKPEDTAVYYCAAQGGSRSDHVYWGQGTQVTVSS

SEQ ID NO: 42620 - protein, 118 aa, Artificial Sequence
  Chemically Synthesized
QVQLQESGGGLVQAGGSLRLSCAASGTISSLSLMGWYRQAPGKEREFVAAINGGTNTYYADSVKGRFTISRDNAKNTVYLQMNSLKPEDTAVYYCAAAYWETRAHTYWGQGTQVTVSS

SEQ ID NO: 42621 - protein, 117 aa, Artificial Sequence
  Chemically Synthesized
QVQLQESGGGLVQAGGSLRLSCAASGNIFRRVRMGWYRQAPGKERELVATIGRGASTYYADSVKGRFTISRDNAKNTVYLQMNSLKPEDTAVYYCAAYIYFISLDYWGQGTQVTVSS

SEQ ID NO: 42622 - protein, 122 aa, Artificial Sequence
  Chemically Synthesized
QVQLQESGGGLVQAGGSLRLSCAASGNIFPAQYMGWYRQAPGKEREFVATIGTGGYYQYADSVKGRFTISRDNAKNTVYLQMNSLKPEDTAVYYCAVDDVKEYPGDHYFDYWGQGTQVTVSS

SEQ ID NO: 42623 - protein, 126 aa, Artificial Sequence
  Chemically Synthesized
QVQLQESGGGLVQAGGSLRLSCAASGNISEYYYMGWYRQAPGKEREFVASIGTGGITYYADSVKGRFTISRDNAKNTVYLQMNSLKPEDTAVYYCAAVVVIYTYYGGSTRYFFRYWGQGTQVTVSS

SEQ ID NO: 42624 - protein, 122 aa, Artificial Sequence
  Chemically Synthesized
QVQLQESGGGLVQAGGSLRLSCAASGTISLQDFMGWYRQAPGKEREFVAGITQGGTTNYADSVKGRFTISRDNAKNTVYLQMNSLKPEDTAVYYCAAGFFGHPGIDRNYDYWGQGTQVTVSS

SEQ ID NO: 42625 - protein, 122 aa, Artificial Sequence
  Chemically Synthesized
QVQLQESGGGLVQAGGSLRLSCAASGSIFLTFIMGWYRQAPGKERELVASIAWGTTTNYADSVKGRFTISRDNAKNTVYLQMNSLKPEDTAVYYCAAKPRYAEEAPWGHQYWGQGTQVTVSS

SEQ ID NO: 42626 - protein, 118 aa, Artificial Sequence
  Chemically Synthesized
QVQLQESGGGLVQAGGSLRLSCAASGSISSAYSMGWYRQAPGKERELVATINYGTNTYYADSVKGRFTISRDNAKNTVYLQMNSLKPEDTAVYYCAAGAPVQSYYGYWGQGTQVTVSS

SEQ ID NO: 42627 - protein, 115 aa, Artificial Sequence
  Chemically Synthesized
QVQLQESGGGLVQAGGSLRLSCAASGTIFIVWYMGWYRQAPGKEREFVATITSVVLPYADSVKGRFTISRDNAKNTVYLQMNSLKPEDTAVYYCAVARPYLFSYWGQGTQVTVSS

SEQ ID NO: 42628 - protein, 118 aa, Artificial Sequence
  Chemically Synthesized
QVQLQESGGGLVQAGGSLRLSCAASGSISGYTRMGWYRQAPGKERELVASINFGSNTNYADSVKGRFTISRDNAKNTVYLQMNSLKPEDTAVYYCAVPGYWYLLLSYWGQGTQVTVSS

SEQ ID NO: 42629 - protein, 122 aa, Artificial Sequence
  Chemically Synthesized
QVQLQESGGGLVQAGGSLRLSCAASGSISAYDKMGWYRQAPGKERELVAAINDGTTTYYADSVKGRFTISRDNAKNTVYLQMNSLKPEDTAVYYCAAYPYIGRAEYFRHLYWGQGTQVTVSS

SEQ ID NO: 42630 - protein, 118 aa, Artificial Sequence
  Chemically Synthesized
QVQLQESGGGLVQAGGSLRLSCAASGSISAWWTMGWYRQAPGKEREFVASITGGTITNYADSVKGRFTISRDNAKNTVYLQMNSLKPEDTAVYYCAVLKYIAIPLRYWGQGTQVTVSS

SEQ ID NO: 42631 - protein, 122 aa, Artificial Sequence
  Chemically Synthesized
QVQLQESGGGLVQAGGSLRLSCAASGTIFVATDMGWYRQAPGKERELVASISQGGITNYADSVKGRFTISRDNAKNTVYLQMNSLKPEDTAVYYCAADWHGPSFPFYYHYYWGQGTQVTVSS

SEQ ID NO: 42632 - protein, 122 aa, Artificial Sequence
  Chemically Synthesized
QVQLQESGGGLVQAGGSLRLSCAASGTISAGYIMGWYRQAPGKERELVATIGFGASTYYADSVKGRFTISRDNAKNTVYLQMNSLKPEDTAVYYCAVPSTIEQERKTDLRYWGQGTQVTVSS

SEQ ID NO: 42633 - protein, 118 aa, Artificial Sequence
  Chemically Synthesized
QVQLQESGGGLVQAGGSLRLSCAASGTISLAYAMGWYRQAPGKERELVAAISYGSNTYYADSVKGRFTISRDNAKNTVYLQMNSLKPEDTAVYYCAVPSYRKPVHSYWGQGTQVTVSS

SEQ ID NO: 42634 - protein, 117 aa, Artificial Sequence
  Chemically Synthesized
QVQLQESGGGLVQAGGSLRLSCAASGSIFLAGMGWYRQAPGKEREFVASIAYGASTYYADSVKGRFTISRDNAKNTVYLQMNSLKPEDTAVYYCAAVYDEYDLYLYWGQGTQVTVSS

SEQ ID NO: 42635 - protein, 117 aa, Artificial Sequence
  Chemically Synthesized
QVQLQESGGGLVQAGGSLRLSCAASGTISKGWDMGWYRQAPGKEREFVASIGGGTTTYYADSVKGRFTISRDNAKNTVYLQMNSLKPEDTAVYYCAASKTTLLLMYWGQGTQVTVSS

SEQ ID NO: 42636 - protein, 118 aa, Artificial Sequence
  Chemically Synthesized
QVQLQESGGGLVQAGGSLRLSCAASGNISKPYAMGWYRQAPGKERELVAAITSGGTTYYADSVKGRFTISRDNAKNTVYLQMNSLKPEDTAVYYCAAPSQTLYRHYYWGQGTQVTVSS

SEQ ID NO: 42637 - protein, 118 aa, Artificial Sequence
  Chemically Synthesized
QVQLQESGGGLVQAGGSLRLSCAASGSIFPPHIMGWYRQAPGKEREFVATIGFGTITYYADSVKGRFTISRDNAKNTVYLQMNSLKPEDTAVYYCAVVFYRLTIHDYWGQGTQVTVSS

SEQ ID NO: 42638 - protein, 113 aa, Artificial Sequence
  Chemically Synthesized
QVQLQESGGGLVQAGGSLRLSCAASGTIFSARSMGWYRQAPGKEREFVAGITVGSSTNYADSVKGRFTISRDNAKNTVYLQMNSLKPEDTAVYYCAALVPLYWGQGTQVTVSS

SEQ ID NO: 42639 - protein, 114 aa, Artificial Sequence
  Chemically Synthesized
QVQLQESGGGLVQAGGSLRLSCAASGTIFPGYPMGWYRQAPGKEREFVATINTNYADSVKGRFTISRDNAKNTVYLQMNSLKPEDTAVYYCAVVIGRGPSHGYWGQGTQVTVSS

SEQ ID NO: 42640 - protein, 118 aa, Artificial Sequence
  Chemically Synthesized
QVQLQESGGGLVQAGGSLRLSCAASGTIFRQYTMGWYRQAPGKERELVASIDLGASTNYADSVKGRFTISRDNAKNTVYLQMNSLKPEDTAVYYCAAYDIDTQFHYYWGQGTQVTVSS

SEQ ID NO: 42641 - protein, 121 aa, Artificial Sequence
  Chemically Synthesized
QVQLQESGGGLVQAGGSLRLSCAASGYIFTYDDMGWYRQAPGKERELVATIDDGSNTYYADSVKGRFTISRDNAKNTVYLQMNSLKPEDTAVYYCAADSVTVGRTLVVIYWGQGTQVTVSS

SEQ ID NO: 42642 - protein, 122 aa, Artificial Sequence
  Chemically Synthesized
QVQLQESGGGLVQAGGSLRLSCAASGTISPSANMGWYRQAPGKEREFVASITTGANTYYADSVKGRFTISRDNAKNTVYLQMNSLKPEDTAVYYCAVITDVPYVYVDNLPYWGQGTQVTVSS

SEQ ID NO: 42643 - protein, 125 aa, Artificial Sequence
  Chemically Synthesized
QVQLQESGGGLVQAGGSLRLSCAASGTIFLFNEMGWYRQAPGKEREFVATIARGATTYADSVKGRFTISRDNAKNTVYLQMNSLKPEDTAVYYCAAYLDLYIQYLVDLTGDLPYWGQGTQVTVSS

SEQ ID NO: 42644 - protein, 122 aa, Artificial Sequence
  Chemically Synthesized
QVQLQESGGGLVQAGGSLRLSCAASGSIFAAVLMGWYRQAPGKERELVATIAVGASTYYADSVKGRFTISRDNAKNTVYLQMNSLKPEDTAVYYCAADADHSSATQIVHLYWGQGTQVTVSS

SEQ ID NO: 42645 - protein, 118 aa, Artificial Sequence
  Chemically Synthesized
QVQLQESGGGLVQAGGSLRLSCAASGTIFSDTSMGWYRQAPGKERELVAAIDPGGITYYADSVKGRFTISRDNAKNTVYLQMNSLKPEDTAVYYCAAYVDVIGGFGYWGQGTQVTVSS

SEQ ID NO: 42646 - protein, 117 aa, Artificial Sequence
  Chemically Synthesized
QVQLQESGGGLVQAGGSLRLSCAASGTIFTTVMGWYRQAPGKERELVASIGDGASTNYADSVKGRFTISRDNAKNTVYLQMNSLKPEDTAVYYCAVDYASSQYLRYWGQGTQVTVSS

SEQ ID NO: 42647 - protein, 116 aa, Artificial Sequence
  Chemically Synthesized
QVQLQESGGGLVQAGGSLRLSCAASGTISWYADMGWYRQAPGKEREFVAAIASGSNTNYADSVKGRFTISRDNAKNTVYLQMNSLKPEDTAVYYCAAYPSYDHKYWGQGTQVTVSS

SEQ ID NO: 42648 - protein, 118 aa, Artificial Sequence
  Chemically Synthesized
QVQLQESGGGLVQAGGSLRLSCAASGTISAYVFMGWYRQAPGKERELVAAIAPGASTYYADSVKGRFTISRDNAKNTVYLQMNSLKPEDTAVYYCAVTYTEYYIYWYWGQGTQVTVSS

SEQ ID NO: 42649 - protein, 117 aa, Artificial Sequence
  Chemically Synthesized
QVQLQESGGGLVQAGGSLRLSCAASGSIFRAFLMGWYRQAPGKERELVATIAYGGITYYADSVKGRFTISRDNAKNTVYLQMNSLKPEDTAVYYCAASASTTVVMYWGQGTQVTVSS

SEQ ID NO: 42650 - protein, 117 aa, Artificial Sequence
  Chemically Synthesized
QVQLQESGGGLVQAGGSLRLSCAASGSIFYLLNMGWYRQAPGKEREFVAAIGNGTNTYYADSVKGRFTISRDNAKNTVYLQMNSLKPEDTAVYYCAVTPTVTLTIYWGQGTQVTVSS

SEQ ID NO: 42651 - protein, 118 aa, Artificial Sequence
  Chemically Synthesized
QVQLQESGGGLVQAGGSLRLSCAASGTIFTVHYMGWYRQAPGKEREFVASIDYGSITNYADSVKGRFTISRDNAKNTVYLQMNSLKPEDTAVYYCAAYADDYSYHSYWGQGTQVTVSS

SEQ ID NO: 42652 - protein, 122 aa, Artificial Sequence
  Chemically Synthesized
QVQLQESGGGLVQAGGSLRLSCAASGNIFLARDMGWYRQAPGKERELVASISKGTTTYYADSVKGRFTISRDNAKNTVYLQMNSLKPEDTAVYYCAADTTDDYDPIYGHAYWGQGTQVTVSS

SEQ ID NO: 42653 - protein, 122 aa, Artificial Sequence
  Chemically Synthesized
QVQLQESGGGLVQAGGSLRLSCAASGTISWPGTMGWYRQAPGKERELVASIAVGANTNYADSVKGRFTISRDNAKNTVYLQMNSLKPEDTAVYYCAAVTPPYVTIEYYYYYWGQGTQVTVSS

SEQ ID NO: 42654 - protein, 118 aa, Artificial Sequence
  Chemically Synthesized
QVQLQESGGGLVQAGGSLRLSCAASGSISTFWTMGWYRQAPGKEREFVATIGRGTSTYYADSVKGRFTISRDNAKNTVYLQMNSLKPEDTAVYYCAVAYYGYYSFRYWGQGTQVTVSS

SEQ ID NO: 42655 - protein, 125 aa, Artificial Sequence
  Chemically Synthesized
QVQLQESGGGLVQAGGSLRLSCAASGSISIPYPMGWYRQAPGKEREFVAGISTGSNTYYADSVKGRFTISRDNAKNTVYLQMNSLKPEDTAVYYCAVGDGPGIYAGGGQSYFQYWGQGTQVTVSS

SEQ ID NO: 42656 - protein, 112 aa, Artificial Sequence
  Chemically Synthesized
QVQLQESGGGLVQAGGSLRLSCAASGSIFGDYSMGWYRQAPGKERELVAAISLGANTNYADSVKGRFTISRDNAKNTVYLQMNSLKPEDTAVYYCAAWTIYWGQGTQVTVSS

SEQ ID NO: 42657 - protein, 121 aa, Artificial Sequence
  Chemically Synthesized
QVQLQESGGGLVQAGGSLRLSCAASGSIFGDDYMGWYRQAPGKERELLPLLLLVLIPYADSVKGRFTISRDNAKNTVYLQMNSLKPEDTAVYYCAVHDTDYSHDLWLHGYWGQGTQVTVSS

SEQ ID NO: 42658 - protein, 125 aa, Artificial Sequence
  Chemically Synthesized
QVQLQESGGGLVQAGGSLRLSCAASGTIFVQANMGWYRQAPGKEREFVAAIDIGANTYYADSVKGRFTISRDNAKNTVYLQMNSLKPEDTAVYYCAADYGHIQELYFTNYPYWYWGQGTQVTVSS

SEQ ID NO: 42659 - protein, 109 aa, Artificial Sequence
  Chemically Synthesized
QVQLQESGGGLVQAGGSLRLSCAASGTISHPDEMGWYRQAPGKEREFVASISVGGSTNYADSVKGRFTISRDNAKNTVYLQMNSLKPEDTAVYYCAFYWGQGTQVTVSS

SEQ ID NO: 42660 - protein, 111 aa, Artificial Sequence
  Chemically Synthesized
QVQLQESGGGLVQAGGSLRLSCAASGTISVLYSMGWYRQAPGKERELVASINYGSNTNYADSVKGRFTISRDNAKNTVYLQMNSLKPEDTAVYYCAVWYYWGQGTQVTVSS

SEQ ID NO: 42661 - protein, 125 aa, Artificial Sequence
  Chemically Synthesized
QVQLQESGGGLVQAGGSLRLSCAASGNIFPYSMGWYRQAPGKEREFVATIARGAITNYADSVKGRFTISRDNAKNTVYLQMNSLKPEDTAVYYCAVRPTVSGRASGEDRYLHAYWGQGTQVTVSS

SEQ ID NO: 42662 - protein, 117 aa, Artificial Sequence
  Chemically Synthesized
QVQLQESGGGLVQAGGSLRLSCAASGYIFPDQMGWYRQAPGKERELVATISAGSTTNYADSVKGRFTISRDNAKNTVYLQMNSLKPEDTAVYYCAVVLPGRRGLAYWGQGTQVTVSS

SEQ ID NO: 42663 - protein, 118 aa, Artificial Sequence
  Chemically Synthesized
QVQLQESGGGLVQAGGSLRLSCAASGTIFDYINMGWYRQAPGKERELVATIASGATTNYADSVKGRFTISRDNAKNTVYLQMNSLKPEDTAVYYCAASYDRAYFHVYWGQGTQVTVSS

SEQ ID NO: 42664 - protein, 121 aa, Artificial Sequence
  Chemically Synthesized
QVQLQESGGGLVQAGGSLRLSCAASGSISKSLMGWYRQAPGKEREFVASIALGGTTYYADSVKGRFTISRDNAKNTVYLQMNSLKPEDTAVYYCAVNPWVQDWDVPLHYYWGQGTQVTVSS

SEQ ID NO: 42665 - protein, 126 aa, Artificial Sequence
  Chemically Synthesized
QVQLQESGGGLVQAGGSLRLSCAASGNIFYYRYMGWYRQAPGKERELVATIDYGGTTNYADSVKGRFTISRDNAKNTVYLQMNSLKPEDTAVYYCAAYYDIDLWYWRYSYVTHEYWGQGTQVTVSS

SEQ ID NO: 42666 - protein, 117 aa, Artificial Sequence
  Chemically Synthesized
QVQLQESGGGLVQAGGSLRLSCAASGSISNSVMGWYRQAPGKERELVAAISYGSITNYADSVKGRFTISRDNAKNTVYLQMNSLKPEDTAVYYCAVSLGATDGYDYWGQGTQVTVSS

SEQ ID NO: 42667 - protein, 118 aa, Artificial Sequence
  Chemically Synthesized
QVQLQESGGGLVQAGGSLRLSCAASGNISVYYNMGWYRQAPGKEREFVASISYGASTYYADSVKGRFTISRDNAKNTVYLQMNSLKPEDTAVYYCAVYRAKSFYHRYWGQGTQVTVSS

SEQ ID NO: 42668 - protein, 126 aa, Artificial Sequence
  Chemically Synthesized
QVQLQESGGGLVQAGGSLRLSCAASGTISAQSYMGWYRQAPGKERELVAAITTGSNTYYADSVKGRFTISRDNAKNTVYLQMNSLKPEDTAVYYCAAIRSGDYEGYPYYYGPLGYWGQGTQVTVSS

SEQ ID NO: 42669 - protein, 118 aa, Artificial Sequence
  Chemically Synthesized
QVQLQESGGGLVQAGGSLRLSCAASGYISLYTYMGWYRQAPGKERELVASIAYGSITNYADSVKGRFTISRDNAKNTVYLQMNSLKPEDTAVYYCAVPRRWEKSLTYWGQGTQVTVSS

SEQ ID NO: 42670 - protein, 115 aa, Artificial Sequence
  Chemically Synthesized
QVQLQESGGGLVQAGGSLRLSCAASGNIFNDGDMGWYRQAPGKERELVATIAYGSNTYYADSVKGRFTISRDNAKNTVYLQMNSLKPEDTAVYYCAADTVYLRYWGQGTQVTVSS

SEQ ID NO: 42671 - protein, 126 aa, Artificial Sequence
  Chemically Synthesized
QVQLQESGGGLVQAGGSLRLSCAASGTIFYSYIMGWYRQAPGKEREFVATITPGTTTNYADSVKGRFTISRDNAKNTVYLQMNSLKPEDTAVYYCAVVGPYQYVVPYYWNYRYGYWGQGTQVTVSS

SEQ ID NO: 42672 - protein, 117 aa, Artificial Sequence
  Chemically Synthesized
QVQLQESGGGLVQAGGSLRLSCAASGYIFWYSYMGWYRQAPGKERELVAAISRGTTYYADSVKGRFTISRDNAKNTVYLQMNSLKPEDTAVYYCAAHRGRIQDLPYWGQGTQVTVSS

SEQ ID NO: 42673 - protein, 118 aa, Artificial Sequence
  Chemically Synthesized
QVQLQESGGGLVQAGGSLRLSCAASGTIFPVVYMGWYRQAPGKERELVAGITYGGSTYYADSVKGRFTISRDNAKNTVYLQMNSLKPEDTAVYYCAVDRYGDAGYLYWGQGTQVTVSS

SEQ ID NO: 42674 - protein, 124 aa, Artificial Sequence
  Chemically Synthesized
QVQLQESGGGLVQAGGSLRLSCAASGYISGYHVMGWYRQAPGKEREFVASIDPGSTTNYADSVKGRFTISRDNAKNTVYLQMNSLKPEDTAVYYCAVAIGYYYWDTPYIYLWYWGQGTQVTVSS

SEQ ID NO: 42675 - protein, 126 aa, Artificial Sequence
  Chemically Synthesized
QVQLQESGGGLVQAGGSLRLSCAASGYISGSSRMGWYRQAPGKEREFVAAIDGGTSTYYADSVKGRFTISRDNAKNTVYLQMNSLKPEDTAVYYCAVDDVAWTTPYDPYYRTAWYWGQGTQVTVSS

SEQ ID NO: 42676 - protein, 118 aa, Artificial Sequence
  Chemically Synthesized
QVQLQESGGGLVQAGGSLRLSCAASGNIFRVRSMGWYRQAPGKERELVAGIAAGSITYYADSVKGRFTISRDNAKNTVYLQMNSLKPEDTAVYYCAALRQVWDALSYWGQGTQVTVSS

SEQ ID NO: 42677 - protein, 118 aa, Artificial Sequence
  Chemically Synthesized
QVQLQESGGGLVQAGGSLRLSCAASGTISAPRYMGWYRQAPGKEREFVAGIAWGTTTYYADSVKGRFTISRDNAKNTVYLQMNSLKPEDTAVYYCAVEPFYPYFFPYWGQGTQVTVSS

SEQ ID NO: 42678 - protein, 122 aa, Artificial Sequence
  Chemically Synthesized
QVQLQESGGGLVQAGGSLRLSCAASGNIFDRDAMGWYRQAPGKERELVASINLGGSTYYADSVKGRFTISRDNAKNTVYLQMNSLKPEDTAVYYCAVDPNVYSYDVDGFGYWGQGTQVTVSS

SEQ ID NO: 42679 - protein, 109 aa, Artificial Sequence
  Chemically Synthesized
QVQLQESGGGLVQAGGSLRLSCAASGNIFAYVYMGWYRQAPGKERELVASINSGGSTNYADSVKGRFTISRDNAKNTVYLQMNSLKPEDTAVYYCAAYWGQGTQVTVSS

SEQ ID NO: 42680 - protein, 118 aa, Artificial Sequence
  Chemically Synthesized
QVQLQESGGGLVQAGGSLRLSCAASGYIFLVRRMGWYRQAPGKEREFVAGIGVGGNTNYADSVKGRFTISRDNAKNTVYLQMNSLKPEDTAVYYCAAAVDYNVRFDYWGQGTQVTVSS

SEQ ID NO: 42681 - protein, 122 aa, Artificial Sequence
  Chemically Synthesized
QVQLQESGGGLVQAGGSLRLSCAASGTISDSYYMGWYRQAPGKERELVASISTGSNTNYADSVKGRFTISRDNAKNTVYLQMNSLKPEDTAVYYCAAWYYWYYYYYLSHTYWGQGTQVTVSS

SEQ ID NO: 42682 - protein, 118 aa, Artificial Sequence
  Chemically Synthesized
QVQLQESGGGLVQAGGSLRLSCAASGTIFWYIRMGWYRQAPGKERELVAAIAVGGTTNYADSVKGRFTISRDNAKNTVYLQMNSLKPEDTAVYYCAAYVPYYYRHDYWGQGTQVTVSS

SEQ ID NO: 42683 - protein, 118 aa, Artificial Sequence
  Chemically Synthesized
QVQLQESGGGLVQAGGSLRLSCAASGYISVSYIMGWYRQAPGKERELVATIAAGTNTYYADSVKGRFTISRDNAKNTVYLQMNSLKPEDTAVYYCAVYHREKGTHDYWGQGTQVTVSS

SEQ ID NO: 42684 - protein, 118 aa, Artificial Sequence
  Chemically Synthesized
QVQLQESGGGLVQAGGSLRLSCAASGTISRRWAMGWYRQAPGKEREFVAAINAGSNTYYADSVKGRFTISRDNAKNTVYLQMNSLKPEDTAVYYCAARYYRYYTHLYWGQGTQVTVSS

SEQ ID NO: 42685 - protein, 118 aa, Artificial Sequence
  Chemically Synthesized
QVQLQESGGGLVQAGGSLRLSCAASGTIFTQSYMGWYRQAPGKERELVAAISYGAITNYADSVKGRFTISRDNAKNTVYLQMNSLKPEDTAVYYCAAGGPRSVPYLYWGQGTQVTVSS

SEQ ID NO: 42686 - protein, 122 aa, Artificial Sequence
  Chemically Synthesized
QVQLQESGGGLVQAGGSLRLSCAASGYISGPPNMGWYRQAPGKEREFVAAIGYGGITYYADSVKGRFTISRDNAKNTVYLQMNSLKPEDTAVYYCAAGPEGTYDLNYLFYYWGQGTQVTVSS

SEQ ID NO: 42687 - protein, 122 aa, Artificial Sequence
  Chemically Synthesized
QVQLQESGGGLVQAGGSLRLSCAASGTIFAIWAMGWYRQAPGKERELVATIDYGASTYYADSVKGRFTISRDNAKNTVYLQMNSLKPEDTAVYYCAARLKGSRWYYRTLGYWGQGTQVTVSS

SEQ ID NO: 42688 - protein, 126 aa, Artificial Sequence
  Chemically Synthesized
QVQLQESGGGLVQAGGSLRLSCAASGTISLTSYMGWYRQAPGKERELVAAISAGGSTYYADSVKGRFTISRDNAKNTVYLQMNSLKPEDTAVYYCAARSRDGGYYYSTYNYIYYYWGQGTQVTVSS

SEQ ID NO: 42689 - protein, 122 aa, Artificial Sequence
  Chemically Synthesized
QVQLQESGGGLVQAGGSLRLSCAASGYISRYNWMGWYRQAPGKERELVASINYGGTTYYADSVKGRFTISRDNAKNTVYLQMNSLKPEDTAVYYCAVRRVVRVFFRNWFDYWGQGTQVTVSS

SEQ ID NO: 42690 - protein, 126 aa, Artificial Sequence
  Chemically Synthesized
QVQLQESGGGLVQAGGSLRLSCAASGTIFGTPYMGWYRQAPGKEREFVASIGYGGNTYYADSVKGRFTISRDNAKNTVYLQMNSLKPEDTAVYYCAATYKLTGNDTSDGGETHDYWGQGTQVTVSS

SEQ ID NO: 42691 - protein, 125 aa, Artificial Sequence
  Chemically Synthesized
QVQLQESGGGLVQAGGSLRLSCAASGNISLAYFMGWYRQAPGKERELVATIGSGASTYYADSVKGRFTISRDNAKNTVYLQMNSLKPEDTAVYYCAAQRNYESPYIRYYYSTIYWGQGTQVTVSS

SEQ ID NO: 42692 - protein, 126 aa, Artificial Sequence
  Chemically Synthesized
QVQLQESGGGLVQAGGSLRLSCAASGTISAANVMGWYRQAPGKERELVATITEGSSTYYADSVKGRFTISRDNAKNTVYLQMNSLKPEDTAVYYCAATYVTIRTRYDAALHAHVYWGQGTQVTVSS

SEQ ID NO: 42693 - protein, 118 aa, Artificial Sequence
  Chemically Synthesized
QVQLQESGGGLVQAGGSLRLSCAASGNIFSDVTMGWYRQAPGKEREFVATIAYGATTYYADSVKGRFTISRDNAKNTVYLQMNSLKPEDTAVYYCAAYTGYPEDHSYWGQGTQVTVSS

SEQ ID NO: 42694 - protein, 118 aa, Artificial Sequence
  Chemically Synthesized
QVQLQESGGGLVQAGGSLRLSCAASGSISVPYVMGWYRQAPGKEREFVAAIARGANTNYADSVKGRFTISRDNAKNTVYLQMNSLKPEDTAVYYCAVSSYVTDYFTYWGQGTQVTVSS

SEQ ID NO: 42695 - protein, 118 aa, Artificial Sequence
  Chemically Synthesized
QVQLQESGGGLVQAGGSLRLSCAASGNIFDGYDMGWYRQAPGKERELVAGISTGTNTNYADSVKGRFTISRDNAKNTVYLQMNSLKPEDTAVYYCAADAFKLSYLDYWGQGTQVTVSS

SEQ ID NO: 42696 - protein, 126 aa, Artificial Sequence
  Chemically Synthesized
QVQLQESGGGLVQAGGSLRLSCAASGYISTYHSMGWYRQAPGKEREFVASIGRGGTTNYADSVKGRFTISRDNAKNTVYLQMNSLKPEDTAVYYCAADHYFGWAGDYSSWLRFAYWGQGTQVTVSS

SEQ ID NO: 42697 - protein, 118 aa, Artificial Sequence
  Chemically Synthesized
QVQLQESGGGLVQAGGSLRLSCAASGNIFVAKGMGWYRQAPGKEREFVATIGAGASTNYADSVKGRFTISRDNAKNTVYLQMNSLKPEDTAVYYCAATASTYYRHQYWGQGTQVTVSS

SEQ ID NO: 42698 - protein, 122 aa, Artificial Sequence
  Chemically Synthesized
QVQLQESGGGLVQAGGSLRLSCAASGTISRPLYMGWYRQAPGKEREFVASIAYGTITNYADSVKGRFTISRDNAKNTVYLQMNSLKPEDTAVYYCAAAIGYKLLNEDNFRYWGQGTQVTVSS

SEQ ID NO: 42699 - protein, 118 aa, Artificial Sequence
  Chemically Synthesized
QVQLQESGGGLVQAGGSLRLSCAASGNIFATRGMGWYRQAPGKERELVATIAPGGSTYYADSVKGRFTISRDNAKNTVYLQMNSLKPEDTAVYYCAAYDYRDAYHYYWGQGTQVTVSS

SEQ ID NO: 42700 - protein, 122 aa, Artificial Sequence
  Chemically Synthesized
QVQLQESGGGLVQAGGSLRLSCAASGYIFTRDTMGWYRQAPGKEREFVASIAIGSTTNYADSVKGRFTISRDNAKNTVYLQMNSLKPEDTAVYYCAAYAYDGDSSIYDLYYWGQGTQVTVSS

SEQ ID NO: 42701 - protein, 118 aa, Artificial Sequence
  Chemically Synthesized
QVQLQESGGGLVQAGGSLRLSCAASGNISYDAFMGWYRQAPGKERELVAGIAWGGITYYADSVKGRFTISRDNAKNTVYLQMNSLKPEDTAVYYCAVATRHHYYHVYWGQGTQVTVSS

SEQ ID NO: 42702 - protein, 118 aa, Artificial Sequence
  Chemically Synthesized
QVQLQESGGGLVQAGGSLRLSCAASGSIFLAYYMGWYRQAPGKERELVASIAYGAITYYADSVKGRFTISRDNAKNTVYLQMNSLKPEDTAVYYCAVSYYPQDIFWYWGQGTQVTVSS

SEQ ID NO: 42703 - protein, 118 aa, Artificial Sequence
  Chemically Synthesized
QVQLQESGGGLVQAGGSLRLSCAASGTIFAYPYMGWYRQAPGKERELVAAIGLGTTTYYADSVKGRFTISRDNAKNTVYLQMNSLKPEDTAVYYCAVTEDGYHTFYYWGQGTQVTVSS

SEQ ID NO: 42704 - protein, 122 aa, Artificial Sequence
  Chemically Synthesized
QVQLQESGGGLVQAGGSLRLSCAASGSIFGYTLMGWYRQAPGKEREFVATITRGSNTYYADSVKGRFTISRDNAKNTVYLQMNSLKPEDTAVYYCAAGVRIDRYGTTTYDYWGQGTQVTVSS

SEQ ID NO: 42705 - protein, 122 aa, Artificial Sequence
  Chemically Synthesized
QVQLQESGGGLVQAGGSLRLSCAASGYISADNYMGWYRQAPGKEREFVAGIGDGSNTYYADSVKGRFTISRDNAKNTVYLQMNSLKPEDTAVYYCAVYYVWEWYSSSLFVYWGQGTQVTVSS

SEQ ID NO: 42706 - protein, 121 aa, Artificial Sequence
  Chemically Synthesized
QVQLQESGGGLVQAGGSLRLSCAASGNISRSVMGWYRQAPGKERELVATIGYGSTTYYADSVKGRFTISRDNAKNTVYLQMNSLKPEDTAVYYCAAYDQWYIYSYSPHYYWGQGTQVTVSS

SEQ ID NO: 42707 - protein, 114 aa, Artificial Sequence
  Chemically Synthesized
QVQLQESGGGLVQAGGSLRLSCAASGYISRQGYMGWYRQAPGKEREFVATITSGTNTYYADSVKGRFTISRDNAKNTVYLQMNSLKPEDTAVYYCALLRRYRYWGQGTQVTVSS

SEQ ID NO: 42708 - protein, 116 aa, Artificial Sequence
  Chemically Synthesized
QVQLQESGGGLVQAGGSLRLSCAASGNISDYAMGWYRQAPGKEREFVAAITVGTTTYYADSVKGRFTISRDNAKNTVYLQMNSLKPEDTAVYYCAAYPDLRIPHYWGQGTQVTVSS

SEQ ID NO: 42709 - protein, 118 aa, Artificial Sequence
  Chemically Synthesized
QVQLQESGGGLVQAGGSLRLSCAASGYISPPTSMGWYRQAPGKEREFVAAIALGSITYYADSVKGRFTISRDNAKNTVYLQMNSLKPEDTAVYYCAVYSTTSDSFGYWGQGTQVTVSS

SEQ ID NO: 42710 - protein, 126 aa, Artificial Sequence
  Chemically Synthesized
QVQLQESGGGLVQAGGSLRLSCAASGYISRYHSMGWYRQAPGKERELVAGIATGAITYYADSVKGRFTISRDNAKNTVYLQMNSLKPEDTAVYYCAAGTLSYLDNYYLYDGPLGYWGQGTQVTVSS

SEQ ID NO: 42711 - protein, 118 aa, Artificial Sequence
  Chemically Synthesized
QVQLQESGGGLVQAGGSLRLSCAASGYISGLRRMGWYRQAPGKEREFVAGIAYGATTNYADSVKGRFTISRDNAKNTVYLQMNSLKPEDTAVYYCAVAARYRYYHYYWGQGTQVTVSS

SEQ ID NO: 42712 - protein, 118 aa, Artificial Sequence
  Chemically Synthesized
QVQLQESGGGLVQAGGSLRLSCAASGYISRRTYMGWYRQAPGKEREFVAGIDYGSTTYYADSVKGRFTISRDNAKNTVYLQMNSLKPEDTAVYYCAVVSLRRRAHTYWGQGTQVTVSS

SEQ ID NO: 42713 - protein, 122 aa, Artificial Sequence
  Chemically Synthesized
QVQLQESGGGLVQAGGSLRLSCAASGSIFQLSTMGWYRQAPGKERELVASISQGGNTYYADSVKGRFTISRDNAKNTVYLQMNSLKPEDTAVYYCAVNFTVHYNVPSVHTYWGQGTQVTVSS

SEQ ID NO: 42714 - protein, 125 aa, Artificial Sequence
  Chemically Synthesized
QVQLQESGGGLVQAGGSLRLSCAASGNIFDYSMGWYRQAPGKEREFVAGIADGGSTYYADSVKGRFTISRDNAKNTVYLQMNSLKPEDTAVYYCAATSRYTGVRYFDADVQFPYWGQGTQVTVSS

SEQ ID NO: 42715 - protein, 118 aa, Artificial Sequence
  Chemically Synthesized
QVQLQESGGGLVQAGGSLRLSCAASGTIFYPVNMGWYRQAPGKEREFVAGIALGAITYYADSVKGRFTISRDNAKNTVYLQMNSLKPEDTAVYYCAVYSQLDDDFRYWGQGTQVTVSS

SEQ ID NO: 42716 - protein, 126 aa, Artificial Sequence
  Chemically Synthesized
QVQLQESGGGLVQAGGSLRLSCAASGNISHHRRMGWYRQAPGKEREFVASISTGTSTYYADSVKGRFTISRDNAKNTVYLQMNSLKPEDTAVYYCAARYTGWHEKRPSPDGGFYYWGQGTQVTVSS

SEQ ID NO: 42717 - protein, 124 aa, Artificial Sequence
  Chemically Synthesized
QVQLQESGGGLVQAGGSLRLSCAASGNIFRSTVMGWYRQAPGKERELVATIAAATTNYADSVKGRFTISRDNAKNTVYLQMNSLKPEDTAVYYCAVAQRGEVDHYRNDSTIFYWGQGTQVTVSS

SEQ ID NO: 42718 - protein, 118 aa, Artificial Sequence
  Chemically Synthesized
QVQLQESGGGLVQAGGSLRLSCAASGNIFVTRVMGWYRQAPGKEREFVAAIDRGGSTYYADSVKGRFTISRDNAKNTVYLQMNSLKPEDTAVYYCAVVRSVRKHYVYWGQGTQVTVSS

SEQ ID NO: 42719 - protein, 118 aa, Artificial Sequence
  Chemically Synthesized
QVQLQESGGGLVQAGGSLRLSCAASGSIFSTKIMGWYRQAPGKERELVATINSGANTNYADSVKGRFTISRDNAKNTVYLQMNSLKPEDTAVYYCAVGSQWYYPFSYWGQGTQVTVSS

SEQ ID NO: 42720 - protein, 118 aa, Artificial Sequence
  Chemically Synthesized
QVQLQESGGGLVQAGGSLRLSCAASGTIFSYRRMGWYRQAPGKERELVAAIGWGGSTYYADSVKGRFTISRDNAKNTVYLQMNSLKPEDTAVYYCAVKRWYRIQYAYWGQGTQVTVSS

SEQ ID NO: 42721 - protein, 118 aa, Artificial Sequence
  Chemically Synthesized
QVQLQESGGGLVQAGGSLRLSCAASGSISRRLIMGWYRQAPGKERELVATITTGTTTNYADSVKGRFTISRDNAKNTVYLQMNSLKPEDTAVYYCAAYHAFLRWLFYWGQGTQVTVSS

SEQ ID NO: 42722 - protein, 121 aa, Artificial Sequence
  Chemically Synthesized
QVQLQESGGGLVQAGGSLRLSCAASGNISTWWMGWYRQAPGKERELVAAIGDGSNTNYADSVKGRFTISRDNAKNTVYLQMNSLKPEDTAVYYCAALGASRIVYYGVYPYWGQGTQVTVSS

SEQ ID NO: 42723 - protein, 118 aa, Artificial Sequence
  Chemically Synthesized
QVQLQESGGGLVQAGGSLRLSCAASGTIFQLDNMGWYRQAPGKERELVAAISGGAITNYADSVKGRFTISRDNAKNTVYLQMNSLKPEDTAVYYCAAGEYLPDDHYYWGQGTQVTVSS

SEQ ID NO: 42724 - protein, 118 aa, Artificial Sequence
  Chemically Synthesized
QVQLQESGGGLVQAGGSLRLSCAASGYIFYRGDMGWYRQAPGKERELVAGIDTGTTTYYADSVKGRFTISRDNAKNTVYLQMNSLKPEDTAVYYCAAGQYDDYSLQYWGQGTQVTVSS

SEQ ID NO: 42725 - protein, 118 aa, Artificial Sequence
  Chemically Synthesized
QVQLQESGGGLVQAGGSLRLSCAASGSIFRYAIMGWYRQAPGKEREFVASIAYGGTTNYADSVKGRFTISRDNAKNTVYLQMNSLKPEDTAVYYCAVTRFRLPRHPYWGQGTQVTVSS

SEQ ID NO: 42726 - protein, 118 aa, Artificial Sequence
  Chemically Synthesized
QVQLQESGGGLVQAGGSLRLSCAASGSIFLYRSMGWYRQAPGKERELVAGITRGASTYYADSVKGRFTISRDNAKNTVYLQMNSLKPEDTAVYYCAVASYRYGFHIYWGQGTQVTVSS

SEQ ID NO: 42727 - protein, 122 aa, Artificial Sequence
  Chemically Synthesized
QVQLQESGGGLVQAGGSLRLSCAASGYISQRVYMGWYRQAPGKEREFVAGISPGGSTNYADSVKGRFTISRDNAKNTVYLQMNSLKPEDTAVYYCAVRRYQRGYYPYYFLYWGQGTQVTVSS

SEQ ID NO: 42728 - protein, 118 aa, Artificial Sequence
  Chemically Synthesized
QVQLQESGGGLVQAGGSLRLSCAASGNIFVVRYMGWYRQAPGKEREFVAGISYGSNTYYADSVKGRFTISRDNAKNTVYLQMNSLKPEDTAVYYCAAFRRWDGRYGYWGQGTQVTVSS

SEQ ID NO: 42729 - protein, 120 aa, Artificial Sequence
  Chemically Synthesized
QVQLQESGGGLVQAGGSLRLSCAASGNISSDHMGWYRQAPGKEREFVAAIAYGGTTYYADSVKGRFTISRDNAKNTVYLQMNSLKPEDTAVYYCALRGRLLTCVLLRMYWGQGTQVTVSS

SEQ ID NO: 42730 - protein, 118 aa, Artificial Sequence
  Chemically Synthesized
QVQLQESGGGLVQAGGSLRLSCAASGTISSTDYMGWYRQAPGKEREFVAAITYGGSTNYADSVKGRFTISRDNAKNTVYLQMNSLKPEDTAVYYCAALNNRSAYFRYWGQGTQVTVSS

SEQ ID NO: 42731 - protein, 122 aa, Artificial Sequence
  Chemically Synthesized
QVQLQESGGGLVQAGGSLRLSCAASGNIFYVRWMGWYRQAPGKERELVAGITKGSNTYYADSVKGRFTISRDNAKNTVYLQMNSLKPEDTAVYYCAAGYFRYRGGGIVHHYWGQGTQVTVSS

SEQ ID NO: 42732 - protein, 117 aa, Artificial Sequence
  Chemically Synthesized
QVQLQESGGGLVQAGGSLRLSCAASGSISRDYLMGWYRQAPGKERELVASITSVLLPYADSVKGRFTISRDNAKNTVYLQMNSLKPEDTAVYYCAAALVDDSSHHYWGQGTQVTVSS

SEQ ID NO: 42733 - protein, 118 aa, Artificial Sequence
  Chemically Synthesized
QVQLQESGGGLVQAGGSLRLSCAASGNIFRYSRMGWYRQAPGKERELVAAITYGSITYYADSVKGRFTISRDNAKNTVYLQMNSLKPEDTAVYYCAVRRKYGDRHAYWGQGTQVTVSS

SEQ ID NO: 42734 - protein, 118 aa, Artificial Sequence
  Chemically Synthesized
QVQLQESGGGLVQAGGSLRLSCAASGNISSWHRMGWYRQAPGKEREFVASIAWGSITNYADSVKGRFTISRDNAKNTVYLQMNSLKPEDTAVYYCAAGGFFRIPLRYWGQGTQVTVSS

SEQ ID NO: 42735 - protein, 117 aa, Artificial Sequence
  Chemically Synthesized
QVQLQESGGGLVQAGGSLRLSCAASGNISVGYTMGWYRQAPGKERELVAGITKGTNTNYADSVKGRFTISRDNAKNTVYLQMNSLKPEDTAVYYCAVWVVTVFSLYWGQGTQVTVSS

SEQ ID NO: 42736 - protein, 118 aa, Artificial Sequence
  Chemically Synthesized
QVQLQESGGGLVQAGGSLRLSCAASGTIFYRGKMGWYRQAPGKERELVASIGRGGTTNYADSVKGRFTISRDNAKNTVYLQMNSLKPEDTAVYYCAAPRRAGYRFWYWGQGTQVTVSS

SEQ ID NO: 42737 - protein, 126 aa, Artificial Sequence
  Chemically Synthesized
QVQLQESGGGLVQAGGSLRLSCAASGYIFTYYAMGWYRQAPGKEREFVAAISTGASTYYADSVKGRFTISRDNAKNTVYLQMNSLKPEDTAVYYCAAGDSLVWDTDVSDDWDLPYWGQGTQVTVSS

SEQ ID NO: 42738 - protein, 118 aa, Artificial Sequence
  Chemically Synthesized
QVQLQESGGGLVQAGGSLRLSCAASGTIFRSRYMGWYRQAPGKEREFVAGIGNGTSTNYADSVKGRFTISRDNAKNTVYLQMNSLKPEDTAVYYCAAAGGWVRDHRYWGQGTQVTVSS

SEQ ID NO: 42739 - protein, 118 aa, Artificial Sequence
  Chemically Synthesized
QVQLQESGGGLVQAGGSLRLSCAASGYISFYIRMGWYRQAPGKEREFVASISNGASTNYADSVKGRFTISRDNAKNTVYLQMNSLKPEDTAVYYCAVRNYWGRSHTYWGQGTQVTVSS

SEQ ID NO: 42740 - protein, 126 aa, Artificial Sequence
  Chemically Synthesized
QVQLQESGGGLVQAGGSLRLSCAASGYISGRTDMGWYRQAPGKERELVATIAGGTSTNYADSVKGRFTISRDNAKNTVYLQMNSLKPEDTAVYYCAADSPYGKSRWYQHINDHYYWGQGTQVTVSS

SEQ ID NO: 42741 - protein, 118 aa, Artificial Sequence
  Chemically Synthesized
QVQLQESGGGLVQAGGSLRLSCAASGYIFRQRYMGWYRQAPGKEREFVAAITIGGSTYYADSVKGRFTISRDNAKNTVYLQMNSLKPEDTAVYYCAATAGGDYRHRYWGQGTQVTVSS

SEQ ID NO: 42742 - protein, 118 aa, Artificial Sequence
  Chemically Synthesized
QVQLQESGGGLVQAGGSLRLSCAASGYISAYYVMGWYRQAPGKERELVATISLGANTYYADSVKGRFTISRDNAKNTVYLQMNSLKPEDTAVYYCAVGGNAARYHWYWGQGTQVTVSS

SEQ ID NO: 42743 - protein, 117 aa, Artificial Sequence
  Chemically Synthesized
QVQLQESGGGLVQAGGSLRLSCAASGYISDSVTMGWYRQAPGKERELVATIGHGSSTNYADSVKGRFTISRDNAKNTVYLQMNSLKPEDTAVYYCAATLSRLLLMYWGQGTQVTVSS

SEQ ID NO: 42744 - protein, 122 aa, Artificial Sequence
  Chemically Synthesized
QVQLQESGGGLVQAGGSLRLSCAASGYIFYLVAMGWYRQAPGKEREFVATIDLGANTNYADSVKGRFTISRDNAKNTVYLQMNSLKPEDTAVYYCAASVRWSSRVDIVYVYWGQGTQVTVSS

SEQ ID NO: 42745 - protein, 120 aa, Artificial Sequence
  Chemically Synthesized
QVQLQESGGGLVQAGGSLRLSCAASGSISHAYWMGWYRQAPGKERELVAGITGGNPYADSVKGRFTISRDNAKNTVYLQMNSLKPEDTAVYYCAVTATQEHQGYNDFTYWGQGTQVTVSS

SEQ ID NO: 42746 - protein, 122 aa, Artificial Sequence
  Chemically Synthesized
QVQLQESGGGLVQAGGSLRLSCAASGYISYSYFMGWYRQAPGKERELVAGIDVGANTYYADSVKGRFTISRDNAKNTVYLQMNSLKPEDTAVYYCAVVRWPSYYYSVVFTYWGQGTQVTVSS

SEQ ID NO: 42747 - protein, 122 aa, Artificial Sequence
  Chemically Synthesized
QVQLQESGGGLVQAGGSLRLSCAASGSISGTQYMGWYRQAPGKEREFVAAISRGGTTYYADSVKGRFTISRDNAKNTVYLQMNSLKPEDTAVYYCAAWPYRYGPLKYRHRYWGQGTQVTVSS

SEQ ID NO: 42748 - protein, 118 aa, Artificial Sequence
  Chemically Synthesized
QVQLQESGGGLVQAGGSLRLSCAASGTISLWQLMGWYRQAPGKERELVAGITSGTSTNYADSVKGRFTISRDNAKNTVYLQMNSLKPEDTAVYYCAADVAVRAGLAYWGQGTQVTVSS

SEQ ID NO: 42749 - protein, 118 aa, Artificial Sequence
  Chemically Synthesized
QVQLQESGGGLVQAGGSLRLSCAASGYIFPRYLMGWYRQAPGKERELVAAIGAGGTTYYADSVKGRFTISRDNAKNTVYLQMNSLKPEDTAVYYCAATYLHRVTYRYWGQGTQVTVSS

SEQ ID NO: 42750 - protein, 118 aa, Artificial Sequence
  Chemically Synthesized
QVQLQESGGGLVQAGGSLRLSCAASGNISFSRYMGWYRQAPGKEREFVASITRGSNTNYADSVKGRFTISRDNAKNTVYLQMNSLKPEDTAVYYCAVVKWYYRQLYYWGQGTQVTVSS

SEQ ID NO: 42751 - protein, 118 aa, Artificial Sequence
  Chemically Synthesized
QVQLQESGGGLVQAGGSLRLSCAASGTISYYPRMGWYRQAPGKEREFVAGITHGTTTYYADSVKGRFTISRDNAKNTVYLQMNSLKPEDTAVYYCAAYRRRYGYYVYWGQGTQVTVSS

SEQ ID NO: 42752 - protein, 118 aa, Artificial Sequence
  Chemically Synthesized
QVQLQESGGGLVQAGGSLRLSCAASGTIFAYTIMGWYRQAPGKERELVATITLGATTYYADSVKGRFTISRDNAKNTVYLQMNSLKPEDTAVYYCAVGKNARLSYGYWGQGTQVTVSS

SEQ ID NO: 42753 - protein, 118 aa, Artificial Sequence
  Chemically Synthesized
QVQLQESGGGLVQAGGSLRLSCAASGNISYSQSMGWYRQAPGKERELVATIGSGGNTNYADSVKGRFTISRDNAKNTVYLQMNSLKPEDTAVYYCAASSPTYYIHAYWGQGTQVTVSS

SEQ ID NO: 42754 - protein, 117 aa, Artificial Sequence
  Chemically Synthesized
QVQLQESGGGLVQAGGSLRLSCAASGYIFRVYVMGWYRQAPGKEREFVASIGLGANTNYADSVKGRFTISRDNAKNTVYLQMNSLKPEDTAVYYCAADTQWRRYGYWGQGTQVTVSS

SEQ ID NO: 42755 - protein, 122 aa, Artificial Sequence
  Chemically Synthesized
QVQLQESGGGLVQAGGSLRLSCAASGNISYIVTMGWYRQAPGKERELVASIAVGSTTNYADSVKGRFTISRDNAKNTVYLQMNSLKPEDTAVYYCAVIWRKRYFGYHYHDYWGQGTQVTVSS

SEQ ID NO: 42756 - protein, 118 aa, Artificial Sequence
  Chemically Synthesized
QVQLQESGGGLVQAGGSLRLSCAASGNISFVYKMGWYRQAPGKEREFVAAIGFGGNTYYADSVKGRFTISRDNAKNTVYLQMNSLKPEDTAVYYCAATRFYRYHYYYWGQGTQVTVSS

SEQ ID NO: 42757 - protein, 122 aa, Artificial Sequence
  Chemically Synthesized
QVQLQESGGGLVQAGGSLRLSCAASGYISPSPPMGWYRQAPGKERELVAAINSGTSTYYADSVKGRFTISRDNAKNTVYLQMNSLKPEDTAVYYCAAQQVGYGLSAAGFGYWGQGTQVTVSS

SEQ ID NO: 42758 - protein, 118 aa, Artificial Sequence
  Chemically Synthesized
QVQLQESGGGLVQAGGSLRLSCAASGSISPAHVMGWYRQAPGKEREFVAGIDQGASTYYADSVKGRFTISRDNAKNTVYLQMNSLKPEDTAVYYCAVWDYVPDLHEYWGQGTQVTVSS

SEQ ID NO: 42759 - protein, 125 aa, Artificial Sequence
  Chemically Synthesized
QVQLQESGGGLVQAGGSLRLSCAASGYIFGYYYMGWYRQAPGKERELVASINAGGTTYYADSVKGRFTISRDNAKNTVYLQMNSLKPEDTAVYYCAAYLYYYVTSVHRSRRYRYWGQGTQVTVSS

SEQ ID NO: 42760 - protein, 118 aa, Artificial Sequence
  Chemically Synthesized
QVQLQESGGGLVQAGGSLRLSCAASGNIFVVYIMGWYRQAPGKEREFVAAIGYGANTNYADSVKGRFTISRDNAKNTVYLQMNSLKPEDTAVYYCAVFTRRQTWHRYWGQGTQVTVSS

SEQ ID NO: 42761 - protein, 122 aa, Artificial Sequence
  Chemically Synthesized
QVQLQESGGGLVQAGGSLRLSCAASGNISYWRAMGWYRQAPGKEREFVAGISYGTITNYADSVKGRFTISRDNAKNTVYLQMNSLKPEDTAVYYCAAPWWKPTGLRSYFAYWGQGTQVTVSS

SEQ ID NO: 42762 - protein, 126 aa, Artificial Sequence
  Chemically Synthesized
QVQLQESGGGLVQAGGSLRLSCAASGYISRYYSMGWYRQAPGKEREFVASINDGASTNYADSVKGRFTISRDNAKNTVYLQMNSLKPEDTAVYYCAAKTYWNRTGTSNYSYPHRYWGQGTQVTVSS

SEQ ID NO: 42763 - protein, 122 aa, Artificial Sequence
  Chemically Synthesized
QVQLQESGGGLVQAGGSLRLSCAASGNISLTDDMGWYRQAPGKERELVAGIDDGTSTYYADSVKGRFTISRDNAKNTVYLQMNSLKPEDTAVYYCAAGRDYVQDWSYQYPYWGQGTQVTVSS

SEQ ID NO: 42764 - protein, 122 aa, Artificial Sequence
  Chemically Synthesized
QVQLQESGGGLVQAGGSLRLSCAASGSIFYEDGMGWYRQAPGKEREFVATIDQGTSTNYADSVKGRFTISRDNAKNTVYLQMNSLKPEDTAVYYCAARWYPQYYLFQRHYYWGQGTQVTVSS

SEQ ID NO: 42765 - protein, 121 aa, Artificial Sequence
  Chemically Synthesized
QVQLQESGGGLVQAGGSLRLSCAASGSISTQGAMGWYRQAPGKEREFVAAISNGTNTNYADSVKGRFTISRDNAKNTVYLQMNSLKPEDTAVYYCAVQWSDYIYVPYHQYWGQGTQVTVSS

SEQ ID NO: 42766 - protein, 122 aa, Artificial Sequence
  Chemically Synthesized
QVQLQESGGGLVQAGGSLRLSCAASGYIFYYLGMGWYRQAPGKERELVATIAGGTNTYYADSVKGRFTISRDNAKNTVYLQMNSLKPEDTAVYYCAVNLNASWRHDPSHYYWGQGTQVTVSS

SEQ ID NO: 42767 - protein, 126 aa, Artificial Sequence
  Chemically Synthesized
QVQLQESGGGLVQAGGSLRLSCAASGNISGPYDMGWYRQAPGKERELVAAIAYGSTTNYADSVKGRFTISRDNAKNTVYLQMNSLKPEDTAVYYCAVDYLSRIGDKWWLYTRLPYWGQGTQVTVSS

SEQ ID NO: 42768 - protein, 118 aa, Artificial Sequence
  Chemically Synthesized
QVQLQESGGGLVQAGGSLRLSCAASGSISQPATMGWYRQAPGKEREFVAGIAQGSNTNYADSVKGRFTISRDNAKNTVYLQMNSLKPEDTAVYYCAVRDIGPGAHVYWGQGTQVTVSS

SEQ ID NO: 42769 - protein, 123 aa, Artificial Sequence
  Chemically Synthesized
QVQLQESGGGLVQAGGSLRLSCAASGNISYDYRMGWYRQAPGKERELVAAISKGGNTNYADSVKGRFTISRDNAKNTVYLQMNSLKPEDTAVYYCAAWLGYYGTPSYDLYTYWGQGTQVTVSS

SEQ ID NO: 42770 - protein, 122 aa, Artificial Sequence
  Chemically Synthesized
QVQLQESGGGLVQAGGSLRLSCAASGTISYDTTMGWYRQAPGKERELVATIDYGGTTNYADSVKGRFTISRDNAKNTVYLQMNSLKPEDTAVYYCAAGYVLDQLWAVRYAYWGQGTQVTVSS

SEQ ID NO: 42771 - protein, 122 aa, Artificial Sequence
  Chemically Synthesized
QVQLQESGGGLVQAGGSLRLSCAASGYISHKRNMGWYRQAPGKERELVASINYGGNTYYADSVKGRFTISRDNAKNTVYLQMNSLKPEDTAVYYCAATRTARWSVVTYHYYWGQGTQVTVSS

SEQ ID NO: 42772 - protein, 117 aa, Artificial Sequence
  Chemically Synthesized
QVQLQESGGGLVQAGGSLRLSCAASGTIFTSSDMGWYRQAPGKERELVASMVTVLVPYADSVKGRFTISRDNAKNTVYLQMNSLKPEDTAVYYCAAEQGDGDQHVYWGQGTQVTVSS

SEQ ID NO: 42773 - protein, 122 aa, Artificial Sequence
  Chemically Synthesized
QVQLQESGGGLVQAGGSLRLSCAASGTIFDGREMGWYRQAPGKERELVAAITAGGTTNYADSVKGRFTISRDNAKNTVYLQMNSLKPEDTAVYYCAVIPSHLLGSDDRHTYWGQGTQVTVSS

SEQ ID NO: 42774 - protein, 117 aa, Artificial Sequence
  Chemically Synthesized
QVQLQESGGGLVQAGGSLRLSCAASGTISDPAYMGWYRQAPGKEREFVATIATGASTNYADSVKGRFTISRDNAKNTVYLQMNSLKPEDTAVYYCAVVLVTLVGLYWGQGTQVTVSS

SEQ ID NO: 42775 - protein, 118 aa, Artificial Sequence
  Chemically Synthesized
QVQLQESGGGLVQAGGSLRLSCAASGYISSVYHMGWYRQAPGKEREFVAGITGGATTYYADSVKGRFTISRDNAKNTVYLQMNSLKPEDTAVYYCAAGNYYYHYYAYWGQGTQVTVSS

SEQ ID NO: 42776 - protein, 126 aa, Artificial Sequence
  Chemically Synthesized
QVQLQESGGGLVQAGGSLRLSCAASGTISPRDDMGWYRQAPGKERELVAGINVGASTNYADSVKGRFTISRDNAKNTVYLQMNSLKPEDTAVYYCAAEYGPRDTYPLTESYDFDYWGQGTQVTVSS

SEQ ID NO: 42777 - protein, 115 aa, Artificial Sequence
  Chemically Synthesized
QVQLQESGGGLVQAGGSLRLSCAASGTIFYYNDMGWYRQAPGKEREFVASINLGGTTYYADSVKGRFTISRDNAKNTVYLQMNSLKPEDTAVYYCAAYVWWFVYWGQGTQVTVSS

SEQ ID NO: 42778 - protein, 118 aa, Artificial Sequence
  Chemically Synthesized
QVQLQESGGGLVQAGGSLRLSCAASGNISGYVYMGWYRQAPGKEREFVAAIATGGSTYYADSVKGRFTISRDNAKNTVYLQMNSLKPEDTAVYYCAARLLYWYYHYYWGQGTQVTVSS

SEQ ID NO: 42779 - protein, 118 aa, Artificial Sequence
  Chemically Synthesized
QVQLQESGGGLVQAGGSLRLSCAASGTISGSIPMGWYRQAPGKEREFVAAISYGTITYYADSVKGRFTISRDNAKNTVYLQMNSLKPEDTAVYYCAVWYTLWSGYKYWGQGTQVTVSS

SEQ ID NO: 42780 - protein, 118 aa, Artificial Sequence
  Chemically Synthesized
QVQLQESGGGLVQAGGSLRLSCAASGTISTSDYMGWYRQAPGKEREFVAAIDDGSNTNYADSVKGRFTISRDNAKNTVYLQMNSLKPEDTAVYYCAVLNARWIHYDYWGQGTQVTVSS

SEQ ID NO: 42781 - protein, 111 aa, Artificial Sequence
  Chemically Synthesized
QVQLQESGGGLVQAGGSLRLSCAASGTISIRDVMGWYRQAPGKERELVASIDSGSITNYADSVKGRFTISRDNAKNTVYLQMNSLKPEDTAVYYCAVLMYWGQGTQVTVSS

SEQ ID NO: 42782 - protein, 126 aa, Artificial Sequence
  Chemically Synthesized
QVQLQESGGGLVQAGGSLRLSCAASGNISYRYAMGWYRQAPGKEREFVASIAKGTNTYYADSVKGRFTISRDNAKNTVYLQMNSLKPEDTAVYYCAALYIYSYYTLRWPYANHQYWGQGTQVTVSS

SEQ ID NO: 42783 - protein, 126 aa, Artificial Sequence
  Chemically Synthesized
QVQLQESGGGLVQAGGSLRLSCAASGSISQHLYMGWYRQAPGKEREFVAGIDVGTSTYYADSVKGRFTISRDNAKNTVYLQMNSLKPEDTAVYYCAAYQDHLGTAVYRAWYDHNYWGQGTQVTVSS

SEQ ID NO: 42784 - protein, 118 aa, Artificial Sequence
  Chemically Synthesized
QVQLQESGGGLVQAGGSLRLSCAASGSISNSYRMGWYRQAPGKEREFVAAIAPGASTNYADSVKGRFTISRDNAKNTVYLQMNSLKPEDTAVYYCAVRRTVPSFFGYWGQGTQVTVSS

SEQ ID NO: 42785 - protein, 117 aa, Artificial Sequence
  Chemically Synthesized
QVQLQESGGGLVQAGGSLRLSCAASGYIFGYTEMGWYRQAPGKERELVAAIDDGGTTYADSVKGRFTISRDNAKNTVYLQMNSLKPEDTAVYYCAVYRENHETLHYWGQGTQVTVSS

SEQ ID NO: 42786 - protein, 118 aa, Artificial Sequence
  Chemically Synthesized
QVQLQESGGGLVQAGGSLRLSCAASGTISYHYAMGWYRQAPGKERELVAGIGWGSTTNYADSVKGRFTISRDNAKNTVYLQMNSLKPEDTAVYYCAVYAWFAPRFRYWGQGTQVTVSS

SEQ ID NO: 42787 - protein, 122 aa, Artificial Sequence
  Chemically Synthesized
QVQLQESGGGLVQAGGSLRLSCAASGSISSNGVMGWYRQAPGKERELVASIATGGNTYYADSVKGRFTISRDNAKNTVYLQMNSLKPEDTAVYYCAVYRYVVRDRRFHYAYWGQGTQVTVSS

SEQ ID NO: 42788 - protein, 118 aa, Artificial Sequence
  Chemically Synthesized
QVQLQESGGGLVQAGGSLRLSCAASGNISAKFPMGWYRQAPGKEREFVATIDYGGNTNYADSVKGRFTISRDNAKNTVYLQMNSLKPEDTAVYYCAVEDYNVNTHGYWGQGTQVTVSS

SEQ ID NO: 42789 - protein, 117 aa, Artificial Sequence
  Chemically Synthesized
QVQLQESGGGLVQAGGSLRLSCAASGYIFRYYDMGWYRQAPGKERELVAVLVPYADSVKGRFTISRDNAKNTVYLQMNSLKPEDTAVYYCAVELGTDLYGDYVFSYWGQGTQVTVSS

SEQ ID NO: 42790 - protein, 118 aa, Artificial Sequence
  Chemically Synthesized
QVQLQESGGGLVQAGGSLRLSCAASGSIFGLFVMGWYRQAPGKEREFVAGIGYGTSTYYADSVKGRFTISRDNAKNTVYLQMNSLKPEDTAVYYCAADLRIYPKYDYWGQGTQVTVSS

SEQ ID NO: 42791 - protein, 121 aa, Artificial Sequence
  Chemically Synthesized
QVQLQESGGGLVQAGGSLRLSCAASGNISAPGHMGWYRQAPGKERELVAAIETVVLPYADSVKGRFTISRDNAKNTVYLQMNSLKPEDTAVYYCAVYDAGYHGGYNVHRYWGQGTQVTVSS

SEQ ID NO: 42792 - protein, 121 aa, Artificial Sequence
  Chemically Synthesized
QVQLQESGGGLVQAGGSLRLSCAASGTISLRHMGWYRQAPGKEREFVAAIDGGTSTYYADSVKGRFTISRDNAKNTVYLQMNSLKPEDTAVYYCAVPYDYVGDYDTAFEYWGQGTQVTVSS

SEQ ID NO: 42793 - protein, 121 aa, Artificial Sequence
  Chemically Synthesized
QVQLQESGGGLVQAGGSLRLSCAASGTISTHGMGWYRQAPGKERELVATIDTGSSTNYADSVKGRFTISRDNAKNTVYLQMNSLKPEDTAVYYCAANYWGWYNSYAYLDYWGQGTQVTVSS

SEQ ID NO: 42794 - protein, 121 aa, Artificial Sequence
  Chemically Synthesized
QVQLQESGGGLVQAGGSLRLSCAASGNIFRYDVMGWYRQAPGKEREFVAGISSVVIPYADSVKGRFTISRDNAKNTVYLQMNSLKPEDTAVYYCAAYPYKSWLGYKVHAYWGQGTQVTVSS

SEQ ID NO: 42795 - protein, 126 aa, Artificial Sequence
  Chemically Synthesized
QVQLQESGGGLVQAGGSLRLSCAASGTIFTAKSMGWYRQAPGKERELVATIAYGANTNYADSVKGRFTISRDNAKNTVYLQMNSLKPEDTAVYYCAADTYSPLLYYAQYAYYFRYWGQGTQVTVSS

SEQ ID NO: 42796 - protein, 118 aa, Artificial Sequence
  Chemically Synthesized
QVQLQESGGGLVQAGGSLRLSCAASGNIFRSYGMGWYRQAPGKERELVAGINFGTTTNYADSVKGRFTISRDNAKNTVYLQMNSLKPEDTAVYYCAAILRVADSLSYWGQGTQVTVSS

SEQ ID NO: 42797 - protein, 118 aa, Artificial Sequence
  Chemically Synthesized
QVQLQESGGGLVQAGGSLRLSCAASGYISDWQIMGWYRQAPGKEREFVASIGIGGTTNYADSVKGRFTISRDNAKNTVYLQMNSLKPEDTAVYYCAAVNTARYAYYYWGQGTQVTVSS

SEQ ID NO: 42798 - protein, 118 aa, Artificial Sequence
  Chemically Synthesized
QVQLQESGGGLVQAGGSLRLSCAASGYISDWSRMGWYRQAPGKEREFVATITTGTNTYYADSVKGRFTISRDNAKNTVYLQMNSLKPEDTAVYYCAVRGSRFDTYGYWGQGTQVTVSS

SEQ ID NO: 42799 - protein, 122 aa, Artificial Sequence
  Chemically Synthesized
QVQLQESGGGLVQAGGSLRLSCAASGNISDRDSMGWYRQAPGKERELVASITWGSITNYADSVKGRFTISRDNAKNTVYLQMNSLKPEDTAVYYCAVRDTYGVYRYKDHPYWGQGTQVTVSS

SEQ ID NO: 42800 - protein, 118 aa, Artificial Sequence
  Chemically Synthesized
QVQLQESGGGLVQAGGSLRLSCAASGYISGNDSMGWYRQAPGKEREFVATITYGTSTNYADSVKGRFTISRDNAKNTVYLQMNSLKPEDTAVYYCAASDYRDAGFQYWGQGTQVTVSS

SEQ ID NO: 42801 - protein, 117 aa, Artificial Sequence
  Chemically Synthesized
QVQLQESGGGLVQAGGSLRLSCAASGSISYDGMGWYRQAPGKERELVASISSGTSTYYADSVKGRFTISRDNAKNTVYLQMNSLKPEDTAVYYCAAGDPKLLDFSYWGQGTQVTVSS

SEQ ID NO: 42802 - protein, 127 aa, Artificial Sequence
  Chemically Synthesized
QVQLQESGGGLVQAGGSLRLSCAASGSIFLTYYVMGWYRQAPGKEREFVASIAYGTNTNYADSVKGRFTISRDNAKNTVYLQMNSLKPEDTAVYYCAVQYFASARDYRYVSWSHAYWGQGTQVTVSS

SEQ ID NO: 42803 - protein, 122 aa, Artificial Sequence
  Chemically Synthesized
QVQLQESGGGLVQAGGSLRLSCAASGTIFGPPQMGWYRQAPGKERELVASIGGGGTTYYADSVKGRFTISRDNAKNTVYLQMNSLKPEDTAVYYCAAAYNYLWRNYYYLTYWGQGTQVTVSS

SEQ ID NO: 42804 - protein, 122 aa, Artificial Sequence
  Chemically Synthesized
QVQLQESGGGLVQAGGSLRLSCAASGTIFSRSYMGWYRQAPGKERELVATIGTGTTTYYADSVKGRFTISRDNAKNTVYLQMNSLKPEDTAVYYCAVSTYQRSTGSPALPYWGQGTQVTVSS

SEQ ID NO: 42805 - protein, 122 aa, Artificial Sequence
  Chemically Synthesized
QVQLQESGGGLVQAGGSLRLSCAASGTISYVDYMGWYRQAPGKEREFVAAIDNGTSTYYADSVKGRFTISRDNAKNTVYLQMNSLKPEDTAVYYCAAATWELAYVGIDHPYWGQGTQVTVSS

SEQ ID NO: 42806 - protein, 122 aa, Artificial Sequence
  Chemically Synthesized
QVQLQESGGGLVQAGGSLRLSCAASGTIFHLYWMGWYRQAPGKEREFVAGISYGGNTYYADSVKGRFTISRDNAKNTVYLQMNSLKPEDTAVYYCAAYDYSFNARSWGHRYWGQGTQVTVSS

SEQ ID NO: 42807 - protein, 122 aa, Artificial Sequence
  Chemically Synthesized
QVQLQESGGGLVQAGGSLRLSCAASGTISKPYTMGWYRQAPGKERELVASIDYGATTNYADSVKGRFTISRDNAKNTVYLQMNSLKPEDTAVYYCAAATVRYVRYLADYAYWGQGTQVTVSS

SEQ ID NO: 42808 - protein, 118 aa, Artificial Sequence
  Chemically Synthesized
QVQLQESGGGLVQAGGSLRLSCAASGYISPWIFMGWYRQAPGKERELVAAITGGTTTYYADSVKGRFTISRDNAKNTVYLQMNSLKPEDTAVYYCAAEHYQQVPFAYWGQGTQVTVSS

SEQ ID NO: 42809 - protein, 122 aa, Artificial Sequence
  Chemically Synthesized
QVQLQESGGGLVQAGGSLRLSCAASGTISYTYDMGWYRQAPGKERELVASIDWGANTNYADSVKGRFTISRDNAKNTVYLQMNSLKPEDTAVYYCAVDTYRGLWHFGYDTYWGQGTQVTVSS

SEQ ID NO: 42810 - protein, 122 aa, Artificial Sequence
  Chemically Synthesized
QVQLQESGGGLVQAGGSLRLSCAASGNISAPYYMGWYRQAPGKEREFVASIDDGSNTYYADSVKGRFTISRDNAKNTVYLQMNSLKPEDTAVYYCAVVYPKGAGGIDDYYYWGQGTQVTVSS

SEQ ID NO: 42811 - protein, 117 aa, Artificial Sequence
  Chemically Synthesized
QVQLQESGGGLVQAGGSLRLSCAASGYISDSRMGWYRQAPGKERELVASIGPGASTYYADSVKGRFTISRDNAKNTVYLQMNSLKPEDTAVYYCAVTFITARGLGYWGQGTQVTVSS

SEQ ID NO: 42812 - protein, 122 aa, Artificial Sequence
  Chemically Synthesized
QVQLQESGGGLVQAGGSLRLSCAASGTIFDVYTMGWYRQAPGKEREFVATITFGTTTYYADSVKGRFTISRDNAKNTVYLQMNSLKPEDTAVYYCAAPYTRRDGNQNDYAYWGQGTQVTVSS

SEQ ID NO: 42813 - protein, 122 aa, Artificial Sequence
  Chemically Synthesized
QVQLQESGGGLVQAGGSLRLSCAASGTISEQGYMGWYRQAPGKEREFVAGIAQGTNTYYADSVKGRFTISRDNAKNTVYLQMNSLKPEDTAVYYCAVKARRYGYSYRTHRYWGQGTQVTVSS

SEQ ID NO: 42814 - protein, 118 aa, Artificial Sequence
  Chemically Synthesized
QVQLQESGGGLVQAGGSLRLSCAASGYIFDDVAMGWYRQAPGKEREFVASISIGGSTNYADSVKGRFTISRDNAKNTVYLQMNSLKPEDTAVYYCAAVHGRRYGYVYWGQGTQVTVSS

SEQ ID NO: 42815 - protein, 117 aa, Artificial Sequence
  Chemically Synthesized
QVQLQESGGGLVQAGGSLRLSCAASGYISEQDYMGWYRQAPGKERELVATIAIGGITYYADSVKGRFTISRDNAKNTVYLQMNSLKPEDTAVYYCAVLLGLNVRMYWGQGTQVTVSS

SEQ ID NO: 42816 - protein, 125 aa, Artificial Sequence
  Chemically Synthesized
QVQLQESGGGLVQAGGSLRLSCAASGTIFLYSAMGWYRQAPGKERELVAAIAVGATTNYADSVKGRFTISRDNAKNTVYLQMNSLKPEDTAVYYCAAFAYNHYQTYYGYHYHFYWGQGTQVTVSS

SEQ ID NO: 42817 - protein, 122 aa, Artificial Sequence
  Chemically Synthesized
QVQLQESGGGLVQAGGSLRLSCAASGTISNGRNMGWYRQAPGKEREFVAGISVGGNTYYADSVKGRFTISRDNAKNTVYLQMNSLKPEDTAVYYCAAQHTYRTDIRDEYGYWGQGTQVTVSS

SEQ ID NO: 42818 - protein, 113 aa, Artificial Sequence
  Chemically Synthesized
QVQLQESGGGLVQAGGSLRLSCAASGTIMGWYRQAPGKEREFVAAITEGSSTNYADSVKGRFTISRDNAKNTVYLQMNSLKPEDTAVYYCAARWQAYWGHLYWGQGTQVTVSS

SEQ ID NO: 42819 - protein, 118 aa, Artificial Sequence
  Chemically Synthesized
QVQLQESGGGLVQAGGSLRLSCAASGYISNYVFMGWYRQAPGKEREFVAGINYGSITNYADSVKGRFTISRDNAKNTVYLQMNSLKPEDTAVYYCAADRLGHIDLRYWGQGTQVTVSS

SEQ ID NO: 42820 - protein, 126 aa, Artificial Sequence
  Chemically Synthesized
QVQLQESGGGLVQAGGSLRLSCAASGTIFDAYTMGWYRQAPGKEREFVASITGGSITYYADSVKGRFTISRDNAKNTVYLQMNSLKPEDTAVYYCAVYGYWRSPYGDPYTTHHHYWGQGTQVTVSS

SEQ ID NO: 42821 - protein, 118 aa, Artificial Sequence
  Chemically Synthesized
QVQLQESGGGLVQAGGSLRLSCAASGYIFGTTYMGWYRQAPGKEREFVAGITWGASTYYADSVKGRFTISRDNAKNTVYLQMNSLKPEDTAVYYCAAIRPYFKIFPYWGQGTQVTVSS

SEQ ID NO: 42822 - protein, 118 aa, Artificial Sequence
  Chemically Synthesized
QVQLQESGGGLVQAGGSLRLSCAASGYISLASDMGWYRQAPGKEREFVASIAAGASTNYADSVKGRFTISRDNAKNTVYLQMNSLKPEDTAVYYCAARRQRTIDHRYWGQGTQVTVSS

SEQ ID NO: 42823 - protein, 126 aa, Artificial Sequence
  Chemically Synthesized
QVQLQESGGGLVQAGGSLRLSCAASGSISGAVPMGWYRQAPGKEREFVAAIGDGTTTNYADSVKGRFTISRDNAKNTVYLQMNSLKPEDTAVYYCAVIVKGSASGIPSRQRWYYYWGQGTQVTVSS

SEQ ID NO: 42824 - protein, 122 aa, Artificial Sequence
  Chemically Synthesized
QVQLQESGGGLVQAGGSLRLSCAASGTISDDTSMGWYRQAPGKEREFVATISSGASTYYADSVKGRFTISRDNAKNTVYLQMNSLKPEDTAVYYCAARIRDSYGYYAAFDYWGQGTQVTVSS

SEQ ID NO: 42825 - protein, 126 aa, Artificial Sequence
  Chemically Synthesized
QVQLQESGGGLVQAGGSLRLSCAASGSISYETIMGWYRQAPGKEREFVAGIAEGSNTNYADSVKGRFTISRDNAKNTVYLQMNSLKPEDTAVYYCAAHAVSHPRFTTGHADEYYYWGQGTQVTVSS

SEQ ID NO: 42826 - protein, 118 aa, Artificial Sequence
  Chemically Synthesized
QVQLQESGGGLVQAGGSLRLSCAASGTISFERYMGWYRQAPGKEREFVAAIDDGTNTYYADSVKGRFTISRDNAKNTVYLQMNSLKPEDTAVYYCAVQDQSTAQYGYWGQGTQVTVSS

SEQ ID NO: 42827 - protein, 117 aa, Artificial Sequence
  Chemically Synthesized
QVQLQESGGGLVQAGGSLRLSCAASGYIFYDYMGWYRQAPGKERELVAAIGTGSSTNYADSVKGRFTISRDNAKNTVYLQMNSLKPEDTAVYYCAAQYGIPYLFYYWGQGTQVTVSS

SEQ ID NO: 42828 - protein, 118 aa, Artificial Sequence
  Chemically Synthesized
QVQLQESGGGLVQAGGSLRLSCAASGTISDPGGMGWYRQAPGKEREFVAGIGVGGSTNYADSVKGRFTISRDNAKNTVYLQMNSLKPEDTAVYYCAVIVDSQGYHYYWGQGTQVTVSS

SEQ ID NO: 42829 - protein, 118 aa, Artificial Sequence
  Chemically Synthesized
QVQLQESGGGLVQAGGSLRLSCAASGSIFSLLVMGWYRQAPGKEREFVATIAGGGTTNYADSVKGRFTISRDNAKNTVYLQMNSLKPEDTAVYYCAAVGRTAYYYGYWGQGTQVTVSS

SEQ ID NO: 42830 - protein, 118 aa, Artificial Sequence
  Chemically Synthesized
QVQLQESGGGLVQAGGSLRLSCAASGNIFVPATMGWYRQAPGKEREFVAAIDRGASTNYADSVKGRFTISRDNAKNTVYLQMNSLKPEDTAVYYCAAVDYHSRKHGYWGQGTQVTVSS

SEQ ID NO: 42831 - protein, 126 aa, Artificial Sequence
  Chemically Synthesized
QVQLQESGGGLVQAGGSLRLSCAASGTISDLTIMGWYRQAPGKEREFVAAIGPGATTNYADSVKGRFTISRDNAKNTVYLQMNSLKPEDTAVYYCAAIYYKYNGREATQTQYLYYWGQGTQVTVSS

SEQ ID NO: 42832 - protein, 117 aa, Artificial Sequence
  Chemically Synthesized
QVQLQESGGGLVQAGGSLRLSCAASGNISPGTVMGWYRQAPGKERELVATISTGTTTYYADSVKGRFTISRDNAKNTVYLQMNSLKPEDTAVYYCAAGDASLWTIYWGQGTQVTVSS

SEQ ID NO: 42833 - protein, 126 aa, Artificial Sequence
  Chemically Synthesized
QVQLQESGGGLVQAGGSLRLSCAASGNISDDSYMGWYRQAPGKEREFVAGINPGASTNYADSVKGRFTISRDNAKNTVYLQMNSLKPEDTAVYYCAAVVYWSRTGFRGSAGYLYYWGQGTQVTVSS

SEQ ID NO: 42834 - protein, 118 aa, Artificial Sequence
  Chemically Synthesized
QVQLQESGGGLVQAGGSLRLSCAASGTIFRYWSMGWYRQAPGKERELVAAINYGGSTYYADSVKGRFTISRDNAKNTVYLQMNSLKPEDTAVYYCAARNLEDYGHPYWGQGTQVTVSS

SEQ ID NO: 42835 - protein, 118 aa, Artificial Sequence
  Chemically Synthesized
QVQLQESGGGLVQAGGSLRLSCAASGSIFTDKDMGWYRQAPGKERELVATITYGGITNYADSVKGRFTISRDNAKNTVYLQMNSLKPEDTAVYYCAVDYTVPIPFDYWGQGTQVTVSS

SEQ ID NO: 42836 - protein, 112 aa, Artificial Sequence
  Chemically Synthesized
QVQLQESGGGLVQAGGSLRLSCAASGIFLGLIMGWYRQAPGKERELIPYADSVKGRFTISRDNAKNTVYLQMNSLKPEDTAVYYCAARAGDTGDFPRAHRYWGQGTQVTVSS

SEQ ID NO: 42837 - protein, 118 aa, Artificial Sequence
  Chemically Synthesized
QVQLQESGGGLVQAGGSLRLSCAASGNIFEHDLMGWYRQAPGKERELVATISSGAITNYADSVKGRFTISRDNAKNTVYLQMNSLKPEDTAVYYCAAQYDVSLELDYWGQGTQVTVSS

SEQ ID NO: 42838 - protein, 126 aa, Artificial Sequence
  Chemically Synthesized
QVQLQESGGGLVQAGGSLRLSCAASGTISRFFGMGWYRQAPGKEREFVAAISEGSSTYYADSVKGRFTISRDNAKNTVYLQMNSLKPEDTAVYYCAVWDVVDYGRVGESLWILRYWGQGTQVTVSS

SEQ ID NO: 42839 - protein, 118 aa, Artificial Sequence
  Chemically Synthesized
QVQLQESGGGLVQAGGSLRLSCAASGSIFSNYDMGWYRQAPGKEREFVATIAIGTITNYADSVKGRFTISRDNAKNTVYLQMNSLKPEDTAVYYCAAVYDLTCFSSYWGQGTQVTVSS

SEQ ID NO: 42840 - protein, 118 aa, Artificial Sequence
  Chemically Synthesized
QVQLQESGGGLVQAGGSLRLSCAASGYIFVVYYMGWYRQAPGKEREFVAGINLGGSTYYADSVKGRFTISRDNAKNTVYLQMNSLKPEDTAVYYCAVIGPTYARHQYWGQGTQVTVSS

SEQ ID NO: 42841 - protein, 120 aa, Artificial Sequence
  Chemically Synthesized
QVQLQESGGGLVQAGGSLRLSCAASGSIFGNYYMGWYRQAPGKERELVAALLWVVIPYADSVKGRFTISRDNAKNTVYLQMNSLKPEDTAVYYCAVYDYGESRWVRWFYWGQGTQVTVSS

SEQ ID NO: 42842 - protein, 121 aa, Artificial Sequence
  Chemically Synthesized
QVQLQESGGGLVQAGGSLRLSCAASGTISYAVVMGWYRQAPGKERELVAGIGRGGTTNYADSVKGRFTISRDNAKNTVYLQMNSLKPEDTAVYYCAVWYYYYVGDGYHGYWGQGTQVTVSS

SEQ ID NO: 42843 - protein, 122 aa, Artificial Sequence
  Chemically Synthesized
QVQLQESGGGLVQAGGSLRLSCAASGSIFNVDWMGWYRQAPGKERELVAAITGGGTTYYADSVKGRFTISRDNAKNTVYLQMNSLKPEDTAVYYCAADVTAVRYIYDRHGYWGQGTQVTVSS

SEQ ID NO: 42844 - protein, 122 aa, Artificial Sequence
  Chemically Synthesized
QVQLQESGGGLVQAGGSLRLSCAASGNISDVPAMGWYRQAPGKEREFVAGISYGTSTNYADSVKGRFTISRDNAKNTVYLQMNSLKPEDTAVYYCAAYLYRASAYPRVLGYWGQGTQVTVSS

SEQ ID NO: 42845 - protein, 121 aa, Artificial Sequence
  Chemically Synthesized
QVQLQESGGGLVQAGGSLRLSCAASGNISDNGLMGWYRQAPGKEREFVATISTGTTTNYADSVKGRFTISRDNAKNTVYLQMNSLKPEDTAVYYCAAFDRDVLNSVLSIYWGQGTQVTVSS

SEQ ID NO: 42846 - protein, 117 aa, Artificial Sequence
  Chemically Synthesized
QVQLQESGGGLVQAGGSLRLSCAASGNISPIRAMGWYRQAPGKEREFVATITGAITYYADSVKGRFTISRDNAKNTVYLQMNSLKPEDTAVYYCAATFYQQDYFGYWGQGTQVTVSS

SEQ ID NO: 42847 - protein, 126 aa, Artificial Sequence
  Chemically Synthesized
QVQLQESGGGLVQAGGSLRLSCAASGTISWEDGMGWYRQAPGKERELVACITYGANTNYADSVKGRFTISRDNAKNTVYLQMNSLKPEDTAVYYCAATVVYTDIQRGYGGDVHYYWGQGTQVTVSS

SEQ ID NO: 42848 - protein, 109 aa, Artificial Sequence
  Chemically Synthesized
QVQLQESGGGLVQAGGSLRLSCAASGTISQYDYMGWYRQAPGKERELVASIAYGATTYYADSVKGRFTISRDNAKNTVYLQMNSLKPEDTAVYYCAVYWGQGTQVTVSS

SEQ ID NO: 42849 - protein, 118 aa, Artificial Sequence
  Chemically Synthesized
QVQLQESGGGLVQAGGSLRLSCAASGTIFRYGYMGWYRQAPGKEREFVAAIGSGASTYYADSVKGRFTISRDNAKNTVYLQMNSLKPEDTAVYYCAAITRENAYYYYWGQGTQVTVSS

SEQ ID NO: 42850 - protein, 126 aa, Artificial Sequence
  Chemically Synthesized
QVQLQESGGGLVQAGGSLRLSCAASGTIFTSYSMGWYRQAPGKEREFVAGIDFGTSTNYADSVKGRFTISRDNAKNTVYLQMNSLKPEDTAVYYCAAWELLYHYGYRRPPDQYDYWGQGTQVTVSS

SEQ ID NO: 42851 - protein, 118 aa, Artificial Sequence
  Chemically Synthesized
QVQLQESGGGLVQAGGSLRLSCAASGSISSPRAMGWYRQAPGKEREFVASINQGSTTNYADSVKGRFTISRDNAKNTVYLQMNSLKPEDTAVYYCAAIDAGADRHYYWGQGTQVTVSS

SEQ ID NO: 42852 - protein, 125 aa, Artificial Sequence
  Chemically Synthesized
QVQLQESGGGLVQAGGSLRLSCAASGNISQYYSMGWYRQAPGKERELVATIGPGTNTYYADSVKGRFTISRDNAKNTVYLQMNSLKPEDTAVYYCAAGLVVTGTGVTLVGMVMYWGQGTQVTVSS

SEQ ID NO: 42853 - protein, 117 aa, Artificial Sequence
  Chemically Synthesized
QVQLQESGGGLVQAGGSLRLSCAASGYIFVTSGMGWYRQAPGKERELVATIANGGIPYADSVKGRFTISRDNAKNTVYLQMNSLKPEDTAVYYCAVWSFVTSGYRYWGQGTQVTVSS

SEQ ID NO: 42854 - protein, 118 aa, Artificial Sequence
  Chemically Synthesized
QVQLQESGGGLVQAGGSLRLSCAASGTISRALAMGWYRQAPGKEREFVAGIGGGTNTNYADSVKGRFTISRDNAKNTVYLQMNSLKPEDTAVYYCAALQADRYLHYYWGQGTQVTVSS

SEQ ID NO: 42855 - protein, 117 aa, Artificial Sequence
  Chemically Synthesized
QVQLQESGGGLVQAGGSLRLSCAASGTISAAIGMGWYRQAPGKERELVAAIGAGGNTNYADSVKGRFTISRDNAKNTVYLQMNSLKPEDTAVYYCAVYNHSASHHYWGQGTQVTVSS

SEQ ID NO: 42856 - protein, 118 aa, Artificial Sequence
  Chemically Synthesized
QVQLQESGGGLVQAGGSLRLSCAASGYIFYADDMGWYRQAPGKERELVATIDHGANTNYADSVKGRFTISRDNAKNTVYLQMNSLKPEDTAVYYCAVIQLSYTQYAYWGQGTQVTVSS

SEQ ID NO: 42857 - protein, 118 aa, Artificial Sequence
  Chemically Synthesized
QVQLQESGGGLVQAGGSLRLSCAASGTIFLARYMGWYRQAPGKEREFVAAINYGGSTYYADSVKGRFTISRDNAKNTVYLQMNSLKPEDTAVYYCAARTDADGEYSYWGQGTQVTVSS

SEQ ID NO: 42858 - protein, 121 aa, Artificial Sequence
  Chemically Synthesized
QVQLQESGGGLVQAGGSLRLSCAASGTISNLYVMGWYRQAPGKERELVASIDTGTNTNYADSVKGRFTISRDNAKNTVYLQMNSLKPEDTAVYYCAVLDDYDSTLVTTIYWGQGTQVTVSS

SEQ ID NO: 42859 - protein, 116 aa, Artificial Sequence
  Chemically Synthesized
QVQLQESGGGLVQAGGSLRLSCAASGSIFHYYVMGWYRQAPGKEREFVALLLLVVLPYADSVKGRFTISRDNAKNTVYLQMNSLKPEDTAVYYCAATTSGTLIIYWGQGTQVTVSS

SEQ ID NO: 42860 - protein, 118 aa, Artificial Sequence
  Chemically Synthesized
QVQLQESGGGLVQAGGSLRLSCAASGTISRDRAMGWYRQAPGKEREFVAAIDQGATTYYADSVKGRFTISRDNAKNTVYLQMNSLKPEDTAVYYCAVQAQAPLFLNYWGQGTQVTVSS

SEQ ID NO: 42861 - protein, 117 aa, Artificial Sequence
  Chemically Synthesized
QVQLQESGGGLVQAGGSLRLSCAASGNISAQFGMGWYRQAPGKERELVAAITRGSNTNYADSVKGRFTISRDNAKNTVYLQMNSLKPEDTAVYYCAVFVLPWVTLYWGQGTQVTVSS

SEQ ID NO: 42862 - protein, 122 aa, Artificial Sequence
  Chemically Synthesized
QVQLQESGGGLVQAGGSLRLSCAASGYISPGEPMGWYRQAPGKERELVAGINVGTNTYYADSVKGRFTISRDNAKNTVYLQMNSLKPEDTAVYYCAVANIHDGYVFGLFIYWGQGTQVTVSS

SEQ ID NO: 42863 - protein, 117 aa, Artificial Sequence
  Chemically Synthesized
QVQLQESGGGLVQAGGSLRLSCAASGYISEWDNMGWYRQAPGKEREFVAGIAKVLVPYADSVKGRFTISRDNAKNTVYLQMNSLKPEDTAVYYCAVVRDYQYNLRYWGQGTQVTVSS

SEQ ID NO: 42864 - protein, 117 aa, Artificial Sequence
  Chemically Synthesized
QVQLQESGGGLVQAGGSLRLSCAASGSISYHYIMGWYRQAPGKERELVAGIDYGASTYYADSVKGRFTISRDNAKNTVYLQMNSLKPEDTAVYYCAVSHEDGDSMYWGQGTQVTVSS

SEQ ID NO: 42865 - protein, 118 aa, Artificial Sequence
  Chemically Synthesized
QVQLQESGGGLVQAGGSLRLSCAASGNISVQRYMGWYRQAPGKEREFVAAINYGGSTYYADSVKGRFTISRDNAKNTVYLQMNSLKPEDTAVYYCAAFDRVGNTFLYWGQGTQVTVSS

SEQ ID NO: 42866 - protein, 122 aa, Artificial Sequence
  Chemically Synthesized
QVQLQESGGGLVQAGGSLRLSCAASGTISGRFNMGWYRQAPGKERELVATITDGGITNYADSVKGRFTISRDNAKNTVYLQMNSLKPEDTAVYYCAALTYRPGVGRQYYYYWGQGTQVTVSS

SEQ ID NO: 42867 - protein, 118 aa, Artificial Sequence
  Chemically Synthesized
QVQLQESGGGLVQAGGSLRLSCAASGYIFTNRYMGWYRQAPGKEREFVAAIGTGSNTNYADSVKGRFTISRDNAKNTVYLQMNSLKPEDTAVYYCAVYPQYRDTLIYWGQGTQVTVSS

SEQ ID NO: 42868 - protein, 117 aa, Artificial Sequence
  Chemically Synthesized
QVQLQESGGGLVQAGGSLRLSCAASGYIFYADNMGWYRQAPGKERELVGTTTNYADSVKGRFTISRDNAKNTVYLQMNSLKPEDTAVYYCAALGQQDDFDVAYHDYWGQGTQVTVSS

SEQ ID NO: 42869 - protein, 109 aa, Artificial Sequence
  Chemically Synthesized
QVQLQESGGGLVQAGGSLRLSCAASGNISPAYSMGWYRQAPGKERELVAGINYGTNTYYADSVKGRFTISRDNAKNTVYLQMNSLKPEDTAVYYCAFYWGQGTQVTVSS

SEQ ID NO: 42870 - protein, 115 aa, Artificial Sequence
  Chemically Synthesized
QVQLQESGGGLVQAGGSLRLSCAASGNIFGSSTMGWYRQAPGKERELVVVIPYADSVKGRFTISRDNAKNTVYLQMNSLKPEDTAVYYCAVYDSTVTVITLVIYWGQGTQVTVSS

SEQ ID NO: 42871 - protein, 117 aa, Artificial Sequence
  Chemically Synthesized
QVQLQESGGGLVQAGGSLRLSCAASGTIFYHDMGWYRQAPGKERELVAAIAHGSTTYYADSVKGRFTISRDNAKNTVYLQMNSLKPEDTAVYYCAVYRYVYNYHRYWGQGTQVTVSS

SEQ ID NO: 42872 - protein, 116 aa, Artificial Sequence
  Chemically Synthesized
QVQLQESGGGLVQAGGSLRLSCAASGNIFVSMGWYRQAPGKERELVAAIANGGTTNYADSVKGRFTISRDNAKNTVYLQMNSLKPEDTAVYYCAARVVVFDDHSYWGQGTQVTVSS

SEQ ID NO: 42873 - protein, 126 aa, Artificial Sequence
  Chemically Synthesized
QVQLQESGGGLVQAGGSLRLSCAASGTIFDSKFMGWYRQAPGKEREFVATITTGATTYYADSVKGRFTISRDNAKNTVYLQMNSLKPEDTAVYYCAVSDIPYGAHSVKADNHVVYWGQGTQVTVSS

SEQ ID NO: 42874 - protein, 125 aa, Artificial Sequence
  Chemically Synthesized
QVQLQESGGGLVQAGGSLRLSCAASGYIFPYIDMGWYRQAPGKERELVAVLMLVLVPYADSVKGRFTISRDNAKNTVYLQMNSLKPEDTAVYYCAAYAGQYDVTYEEAFANFRYWGQGTQVTVSS

SEQ ID NO: 42875 - protein, 117 aa, Artificial Sequence
  Chemically Synthesized
QVQLQESGGGLVQAGGSLRLSCAASGYIFNGTDMGWYRQAPGKEREFVASIAGGGTTYYADSVKGRFTISRDNAKNTVYLQMNSLKPEDTAVYYCAAGREDWQYDYWGQGTQVTVSS

SEQ ID NO: 42876 - protein, 124 aa, Artificial Sequence
  Chemically Synthesized
QVQLQESGGGLVQAGGSLRLSCAASGNISAADTMGWYRQAPGKEREFVAGIDYGTTTNYADSVKGRFTISRDNAKNTVYLQMNSLKPEDTAVYYCAVVATSYYPPGGYSIHAYWGQGTQVTVSS

SEQ ID NO: 42877 - protein, 118 aa, Artificial Sequence
  Chemically Synthesized
QVQLQESGGGLVQAGGSLRLSCAASGTISQTYVMGWYRQAPGKEREFVASINRGSNTNYADSVKGRFTISRDNAKNTVYLQMNSLKPEDTAVYYCAAVNGQFRYLYYWGQGTQVTVSS

SEQ ID NO: 42878 - protein, 122 aa, Artificial Sequence
  Chemically Synthesized
QVQLQESGGGLVQAGGSLRLSCAASGSIFQYVAMGWYRQAPGKERELVAGISNGAITNYADSVKGRFTISRDNAKNTVYLQMNSLKPEDTAVYYCAAGDDLAFRGSRYHAYWGQGTQVTVSS

SEQ ID NO: 42879 - protein, 117 aa, Artificial Sequence
  Chemically Synthesized
QVQLQESGGGLVQAGGSLRLSCAASGNIFYLSGMGWYRQAPGKEREFVASIAMVVLPYADSVKGRFTISRDNAKNTVYLQMNSLKPEDTAVYYCAAQQEVVLNYYYWGQGTQVTVSS

SEQ ID NO: 42880 - protein, 116 aa, Artificial Sequence
  Chemically Synthesized
QVQLQESGGGLVQAGGSLRLSCAASGTSSVFMGWYRQAPGKERELVASIDNGGSTNYADSVKGRFTISRDNAKNTVYLQMNSLKPEDTAVYYCAVFHSNYGWYGYWGQGTQVTVSS

SEQ ID NO: 42881 - protein, 117 aa, Artificial Sequence
  Chemically Synthesized
QVQLQESGGGLVQAGGSLRLSCAASGTISDAYYMGWYRQAPGKERELVATITQGTTPYADSVKGRFTISRDNAKNTVYLQMNSLKPEDTAVYYCAAYGYDETTYAYWGQGTQVTVSS

SEQ ID NO: 42882 - protein, 118 aa, Artificial Sequence
  Chemically Synthesized
QVQLQESGGGLVQAGGSLRLSCAASGTISSFRRMGWYRQAPGKEREFVAGIDEGSNTYYADSVKGRFTISRDNAKNTVYLQMNSLKPEDTAVYYCAVSIIRRVSHYYWGQGTQVTVSS

SEQ ID NO: 42883 - protein, 118 aa, Artificial Sequence
  Chemically Synthesized
QVQLQESGGGLVQAGGSLRLSCAASGTISDDAYMGWYRQAPGKEREFVAGINYGANTNYADSVKGRFTISRDNAKNTVYLQMNSLKPEDTAVYYCAAAFLYWHPFLYWGQGTQVTVSS

SEQ ID NO: 42884 - protein, 117 aa, Artificial Sequence
  Chemically Synthesized
QVQLQESGGGLVQAGGSLRLSCAASGYISGRIYMGWYRQAPGKEREFVASINYGTSTYYADSVKGRFTISRDNAKNTVYLQMNSLKPEDTAVYYCAAVTANLHHYYWGQGTQVTVSS

SEQ ID NO: 42885 - protein, 125 aa, Artificial Sequence
  Chemically Synthesized
QVQLQESGGGLVQAGGSLRLSCAASGTISNSQAMGWYRQAPGKERELVAGITAGGITNYADSVKGRFTISRDNAKNTVYLQMNSLKPEDTAVYYCAAYIWHYYSVDTYDAYHIYWGQGTQVTVSS

SEQ ID NO: 42886 - protein, 113 aa, Artificial Sequence
  Chemically Synthesized
QVQLQESGGGLVQAGGSLRLSCAASGTISLTLFMGWYRQAPGKEREFVAAIDSGANTYYADSVKGRFTISRDNAKNTVYLQMNSLKPEDTAVYYCAVGRHRYWGQGTQVTVSS

SEQ ID NO: 42887 - protein, 118 aa, Artificial Sequence
  Chemically Synthesized
QVQLQESGGGLVQAGGSLRLSCAASGTIFRGWYMGWYRQAPGKEREFVASIDPGSTTNYADSVKGRFTISRDNAKNTVYLQMNSLKPEDTAVYYCAAVSPGVAYLYYWGQGTQVTVSS

SEQ ID NO: 42888 - protein, 120 aa, Artificial Sequence
  Chemically Synthesized
QVQLQESGGGLVQAGGSLRLSCAASGTISGGRDMGWYRQAPGKERELVATINHGATTNYADSVKGRFTISRDNAKNTVYLQMNSLKPEDTAVYYCAAADALRLTTLTIYWGQGTQVTVSS

SEQ ID NO: 42889 - protein, 118 aa, Artificial Sequence
  Chemically Synthesized
QVQLQESGGGLVQAGGSLRLSCAASGYISAGYYMGWYRQAPGKEREFVAAINTGSSTNYADSVKGRFTISRDNAKNTVYLQMNSLKPEDTAVYYCAAASDRPSYLYYWGQGTQVTVSS

SEQ ID NO: 42890 - protein, 118 aa, Artificial Sequence
  Chemically Synthesized
QVQLQESGGGLVQAGGSLRLSCAASGSIFTETPMGWYRQAPGKEREFVAAIGHGASTNYADSVKGRFTISRDNAKNTVYLQMNSLKPEDTAVYYCAAVVRYSTYHAYWGQGTQVTVSS

SEQ ID NO: 42891 - protein, 10 aa, Artificial Sequence
  Chemically Synthesized
GSLRLSCAAS

SEQ ID NO: 42892 - protein, 10 aa, Artificial Sequence
  Chemically Synthesized
GWYRQAPGKE

SEQ ID NO: 42893 - protein, 10 aa, Artificial Sequence
  Chemically Synthesized
WYRQAPGKER

SEQ ID NO: 42894 - protein, 10 aa, Artificial Sequence
  Chemically Synthesized
ADSVKGRFTI

SEQ ID NO: 42895 - protein, 10 aa, Artificial Sequence
  Chemically Synthesized
KPEDTAVYYC

SEQ ID NO: 42896 - protein, 10 aa, Artificial Sequence
  Chemically Synthesized
WGQGTQVTVS

SEQ ID NO: 42897 - DNA, 23 bp, Artificial Sequence
  Chemically Synthesized
ctgttattgctagcgttttagca

SEQ ID NO: 42898 - DNA, 18 bp, Artificial Sequence
  Chemically Synthesized
gccaccagaagcggccgc

SEQ ID NO: 42899 - DNA, 64 bp, Artificial Sequence
  Chemically Synthesized
  misc_feature (35)..(42): any nucleotide
gtctcgtgggctcggagatgtgtataagagacagnnnnnnnncgtatgggtaagaaccaccgct

SEQ ID NO: 42900 - DNA, 56 bp, Artificial Sequence
  Chemically Synthesized
  misc_feature (34)..(41): any nucleotide
tcgtcggcagcgtcagatgtgtataagagacagnnnnnnnnagctgcgcggcgagc
